(19) United States
(12) Patent Application Publication
(10) Pub. No.: US 2010/0152055 A1
(43) Pub. Date: Jun. 17, 2010

(54) Composition and method for diagnosing kidney cancer and for predicting prognosis for kidney cancer patient

(76) Inventors: Satoko Kozono, Kanagawa (JP); Hideo Akiyama, Kanagawa (JP); Akira Myomoto, Shiga (JP); Yoshinori Tanaka, Kanagawa (JP); Giman Jung, Kanagawa (JP); Hitoshi Nobumasa, Shiga (JP); Osamu Nomura, Kanagawa (JP); Osamu Ogawa, Kyoto (JP); Eijiro Nakamura, Kyoto (JP); Gozo Tsujimoto, Kyoto (JP)

Correspondence Address: BIRCH STEWART KOLASCH & BIRCH, PO BOX 747, FALLS CHURCH, VA, 22040-0747, US

(21) Appl. No.: 11/991,297

(22) PCT Filed: Sep. 1, 2006
(86) PCT No.: PCT/JP2006/317380

§ 371 Date: Feb. 29, 2008

(30) Foreign Application Priority Data
Sep. 2, 2005 (JP) 2005-255499
Nov. 1, 2005 (JP) 2005-318589

(51) Int. Cl. C40B 30/04; C12Q 1/68; C40B 40/06

(52) U.S. Cl. 506/9; 435/6; 506/16

(57) ABSTRACT

This invention relates to a composition, kit, DNA chip, and use thereof for detecting, diagnosing, and predicting metastasis of kidney cancer and/or for predicting the prognosis for kidney cancer, comprising one or a plurality of polynucleotides selected from the group consisting of polynucleotides, mutants thereof or fragments thereof, the expression levels of which vary in kidney cancer cells from a patient with a poor prognosis when compared with that in kidney cancer cells from a patient with a good prognosis; or antibodies or fragments thereof that bind specifically to polypeptides, mutants thereof or fragments thereof, the expression levels of which vary in the similar manner.

### FIELD OF THE INVENTION

[0001] The present invention relates to a composition for identifying (or diagnosing) a disease that is useful for predicting the prognosis for a subject and/or for predicting or detecting metastasis of kidney cancer, to a method for predicting or identifying the prognosis for a subject and/or metastasis of kidney cancer using the composition, and to a kit for predicting the prognosis for a subject and/or metastasis of kidney cancer using the composition.

### BACKGROUND OF THE INVENTION

[0002] The kidney is an important urinary organ that plays a key role in eliminating waste products from the body by filtering the blood and generating urine. The kidney is also important as an endocrine organ that produces hormones such as angiotensin, which controls the blood pressure, or erythropoietin, which is an erythropoietic factor.

[0003] Tumors that develop in the kidney are classified into: kidney cell cancer, which occurs in adults; Wilms' tumor, which occurs in children; and sarcoma, which is a rare form of tumor. Hereafter, malignant kidney cell cancer, which has the highest incidence, is referred to as “kidney cancer.” In Japan, the frequency of kidney cancer development is approximately 2.5 people per 100,000 people, the male to female ratio thereof is 2 to 3:1, and men are more likely to develop kidney cancer. Among malignant urologic tumors, kidney cancer has the highest frequency after prostate cancer and bladder cancer.

[0004] As risk factors for kidney cancer, genetic factors are known. In general, smoking, excessive fat intake, and the like are known as risk factors. Also, such tumors frequently develop in long-term dialysis patients.

[0005] When the maximal diameter of the kidney tumor is not greater than 5 cm, the patients hardly have any subjective symptoms, and such tumors are often found via CT scanning at the time of physical examination. In the case of large-size tumors, hematuria, abdominal tumors, pain, or other symptoms are observed. As systemic symptoms, fever onset, weight loss, anemia, or other symptoms may occur, and erythrocytosis, elevated blood pressure, hypercalcemia, or other disease may be caused by endocrine factors. Also, spreading kidney cancer in the postcaval vein may occur in a varicose on the abdominal surface or in the testicular varicocele. Approximately 20% of kidney cancer cases are detected upon lung or bone metastasis. Kidney tumors are likely to spread in the vein and easily metastasize to other organs.

[0006] Examples of methods for detecting kidney cancer include echography, CT scanning, and angiography; however, specific biochemical markers are not yet known. Thus, examination with the use of equipment is necessary.

[0007] Also, kidney cancer can be further pathologically classified. Clear cell kidney cancer, which accounts for 90% of cases, is known to develop as a result of defects of the von-Hippel-Lindau (VHL) genes, which are cancer suppressive genes (Latif, F. et al., Science, 1993, vol. 260, pp. 1317-1320). VHL gene defects activate transcription of hypoxia-induced genes via disturbance of HIF-α/VHF aggregation (Maxwell, P. et al., Nature, 1999, vol. 399, pp. 271-275) and also enhance the expression of genes such as VEGF and TGFβ.

[0008] The main treatment for kidney cancer is surgical treatment. Regardless of the disease stage, partial or total removal of the kidney is the most common method when possible. Even if metastasis has already occurred, surgical removal of the kidney may be considered. In addition to surgical treatment, arterial embolization of the renal artery is possible. This method may be employed when surgical removal is unfeasible or before surgical removal of large tumors.

[0009] Because of the recent development of image diagnostic technologies, a very small size of kidney cancer has become detectable at an early stage. Through early-stage treatment, 90% (or more) of cancer patients can be treated. Since the treatment results for large tumors of 5 cm or greater or for metastatic tumors are poor (5-year survival rates for kidney cell cancer patients overall are approximately 50% to 60%), it is crucial to conduct high-throughput testing and diagnosis of the presence of tumors or tumor metastasis, to predict the prognosis, and to compose regimen or treatment plans.

[0010] As a method for detecting or diagnosing human kidney cancer, a method wherein differences in gene expression levels are employed is disclosed in WO 2005/024603. As proteins that are known to increase in human kidney cancer, PDE8B (WO 2004/042077), FLOT1 (WO 2004/048933), CD5 (Nagase, Y. et al., the Japanese Journal of Urology, 1991, vol. 82, pp. 1781-1789), and ECM1 (U.S. Pat. No. 6,303,765) are known, in addition to MMP2, which is considered to enhance cancer cell motility by degrading the extracellular matrix (Lein, M. et al., International Journal of Cancer, 2000, vol. 85, pp. 801-804), and TNFRSF7, whose expression level is known to increase in the case of renal disorder (Nakatsuji, T., Clinical and Experimental Medicine, 2003, vol. 2, pp. 192-196). Their specificities, however, are not relatively high, and a highly sensitive method for detecting kidney cancer based only on the expression levels of such proteins has not yet been put to clinical applications. Further, MCM3AP (JP Patent Publication (kohyo) No. 2005-520536 (A)), KRT19 (JP Patent Publication (kohyo) No. 2005-507997 (A)), SLK4 (WO 2002/06339), C5P1 (JP Patent Publication (kohyo) No. 2004-518402 (A)), FGF2 (Miyake, H. et al., 1996, Cancer Research, vol. 56, pp. 2440-2445), MMP14 (Kitagawa, Y. et al., 1999, Journal of Urology, vol. 162, pp. 905-909), ERBB2 (Freeman, M. R. et al., 1989, Cancer Research, vol. 49, pp. 6221-6225), and the like are deduced as tumor-associated markers for cancer, including kidney cancer.

### DISCLOSURE OF THE INVENTION

### Problems to be Solved by the Invention

[0011] As described above, gene expression markers for kidney cancer are well known; however, diagnostic markers capable of predicting metastasis and markers for predicting the prognosis are hardly known. Since existing markers have poor specificity and/or sensitivity and an effective method for detecting such markers from biological samples has not yet been established, such existing markers have not yet been clinically used in general. Thus, markers for kidney cancer with higher specificity and sensitivity have been desired.

[0012] If a plurality of effective markers for kidney cancer are discovered, remarkable progress can be expected in the treatment of kidney cancer or metastatic kidney cancer. In particular, many metastatic kidney cancer patients have poor prognoses. If the occurrence of metastasis is discovered at the time of diagnosis, more effective treatment can be provided to improve prognosis.

[0013] An object of the invention is to provide a composition, kit, or DNA chip for identifying a disease, which is useful for diagnosing kidney cancer, for diagnosing the metastasis of kidney cancer (or prognosis), and for treating kidney cancer.

[0014] Another object of the invention is to provide a method for detecting, identifying, or predicting the presence or metastasis of kidney cancer using the composition, kit, or DNA chip.

### Means for Solving Problems

[0015] Markers may be searched for by a method wherein the prognosis for kidney cancer patients is observed and the gene expression levels or the protein expression levels in the kidney cancer cells from patients with good prognoses and in the kidney cancer cells from patients with poor prognoses or the amounts of metabolites of such cells are compared by some means; a method wherein the amounts of genes, proteins, or metabolites in body fluids and tissues containing the kidney cancer cells from patients with good prognoses or tissues containing the kidney cancer cells from patients with poor prognoses; or other methods.

[0016] In recent years, analysis of gene expression levels using DNA arrays has been commonly used as a method for searching for such markers. DNA arrays comprise probes having nucleotide sequences corresponding to several hundreds to several tens of thousands of genes immobilized thereon. By applying analyte samples to DNA arrays, the genes in the samples bind to probes, and the amount of binding is determined by some means. Thus, the amount of genes in the analyte samples can be determined. The genes corresponding to the probes to be immobilized on the DNA arrays can be freely selected, kidney cancer cells from patients with good prognoses and poor prognoses can be used as analyte samples, and the gene expression levels in the samples may be compared. Thus, genes that can become markers for predicting the metastasis of kidney cancer and/or the prognosis for kidney cancer patients can be deduced.

[0017] In order to overcome the aforementioned problem, we have analyzed, with the use of DNA arrays, the gene expression levels in the kidney cancer tissue from patients with good prognoses and in the kidney cancer tissue from patients with poor prognoses. Further, we have selected the genes that can discriminate the kidney cancer tissue from a patient with good prognosis from the kidney cancer tissue from a patient with poor prognosis, and/or that can determine the presence or absence of metastasis of kidney cancer by using the effect of the gene expression levels determined using DNA arrays on changes in survival rates for patients with the elapse of time after the surgery as an indication. This has led to the completion of the present invention.

### SUMMARY OF THE INVENTION

[0018] The present invention includes the following characteristics.

[0019] (1) A composition for detecting, identifying, or predicting the presence or metastasis of kidney cancer in a subject in vitro comprising one or more probes selected from the probes of the following group I and/or group II:

[0020] group I: polynucleotides consisting of:

[0021] (a) a polynucleotide consisting of a nucleotide sequence as shown in any of SEQ ID NOS: 1 to 10, 12 to 20, and 22 to 47, a mutant thereof, or a fragment comprising at least 15 continuous nucleotides thereof,

[0022] (b) a polynucleotide comprising a nucleotide sequence as shown in any of SEQ ID NOS: 1 to 10, 12 to 20, and 22 to 47,

[0023] (c) a polynucleotide consisting of a nucleotide sequence complementary to a nucleotide sequence as shown in any of SEQ ID NOS: 1 to 10, 12 to 20, and 22 to 47, a mutant thereof, or a fragment comprising at least 15 continuous nucleotides thereof,

[0024] (d) a polynucleotide comprising a nucleotide sequence complementary to a nucleotide sequence as shown in any of SEQ ID NOS: 1 to 10, 12 to 20, and 22 to 47, and

[0025] (e) a polynucleotide hybridizing under stringent conditions to any of the polynucleotides (a) to (d), or a fragment comprising at least 15 continuous nucleotides thereof; and

[0026] group II: antibodies, fragments thereof or chemically modified derivatives thereof consisting of:

[0027] (f) an antibody specifically binding to at least one of a polypeptide comprising an amino acid sequence encoded by a nucleotide sequence as shown in any of SEQ ID NOS: 1 to 10, 12 to 20, and 22 to 47, a polypeptide having an amino acid sequence as shown in any of SEQ ID NOS: 101 to 110, 112 to 120, and 122 to 147, a mutant of the polypeptide, and a fragment of the polypeptide; a fragment of the antibody; or a chemically modified derivative of the antibody,

[0028] (g) an antibody specifically binding to at least one of a polypeptide having an amino acid sequence as shown in any of SEQ ID NOS: 151, 153, and 155 to 160, a mutant of the polypeptide, and a fragment of the polypeptide; a fragment of the antibody; or a chemically modified derivative of the antibody, and

[0029] (h) an antibody specifically binding to at least one of a polypeptide having an amino acid sequence as shown in any of SEQ ID NOS: 161 to 190, a mutant of the polypeptide, and a fragment of the polypeptide; a fragment of the antibody; or a chemically modified derivative of the antibody.

[0030] (2) The composition according to (1) above, wherein each of the probes of group I and group II (0 is capable of detecting, identifying, or predicting the presence or metastasis of kidney cancer.

[0031] (3) The composition according to (1) above, wherein each of the probes of group II (g) and (h) is capable of detecting, identifying, or predicting the presence of kidney cancer.

[0032] (4) The composition according to (1) above, wherein the polynucleotide is DNA or RNA.

[0033] (5) The composition according to (1) above, wherein the fragments of group I are each a polynucleotide comprising at least 60 continuous nucleotides.

[0034] (6) The composition according to (1) above, wherein the fragments of group I are each a polynucleotide comprising a nucleotide sequence as shown in any of SEQ ID NOS: 51 to 60, 62 to 70, and 72 to 97 in the nucleotide sequence as shown in any of SEQ ID NOS: 1 to 10, 12 to 20, and 22 to 47 or a polynucleotide comprising a nucleotide sequence complementary thereto.

[0035] (7) The composition according to (1) above, wherein the fragments of group I are each a polynucleotide comprising a nucleotide sequence as shown in any of SEQ ID NOS: 51 to 60, 62 to 70, and 72 to 97 or a nucleotide sequence complementary thereto.

[0036] (8) The composition according to (1) above, which further comprises, as a probe, one or more polynucleotides selected from among a polynucleotide consisting of the nucleotide sequence as shown in any of SEQ ID NOS: 11, 21, and 48 to 50, a polynucleotide consisting of a complementary sequence thereof, a polynucleotide hybridizing under stringent conditions to said polynucleotide, or a fragment comprising at least 15 continuous nucleotides thereof, in addition to the probe or probes of group I.

[0037] (9) The composition according to (8) above, wherein the fragment is a polynucleotide comprising at least 60 continuous nucleotides.

[0038] (10) The composition according to (8) above, wherein the fragment is a polynucleotide comprising the nucleotide sequence as shown in any of SEQ ID NOS: 61, 71, and 98 to 100 in the nucleotide sequence as shown in any of SEQ ID NOS: 11, 21, and 48 to 50 or a polynucleotide comprising a nucleotide sequence complementary thereto.

[0039] (11) The composition according to (8) above, wherein the fragment is. a polynucleotide comprising the nucleotide sequence as shown in any of SEQ ID NOS: 61, 71, and 98 to 100 or a nucleotide sequence complementary thereto.

[0040] (12) The composition according to (1) above, which further comprises an antibody that binds specifically to at least one of a polypeptide as shown in any of SEQ ID NOS: 111, 121, and 148 to 150, a mutant of the polypeptide, and a fragment of the polypeptide; a fragment of the antibody; or a chemically modified derivative of the antibody, in addition to the probe or probes of group II (f).

[0041] (13) The composition according to (1) above, which further comprises an antibody that binds specifically to at least one of a polypeptide comprising an amino acid sequence as shown in any of SEQ ID NOS: 152, 154, and 191, a mutant of the polypeptide, and a fragment of the polypeptide; a fragment of the antibody; or a chemically modified derivative of the antibody, in addition to the probe or probes of group II (g).

[0042] (14) The composition according to (1) above, which further comprises an antibody that binds specifically to at least one of a polypeptide comprising an amino acid sequence as shown in any of SEQ ID NOS: 192 to 197, a mutant of the polypeptide, and a fragment of the polypeptide; a fragment of the antibody; or a chemically modified derivative of the antibody, in addition to the probe or probes of group II (h).

[0043] (15) The composition according to any of (1), (12), (13), or (14), wherein the fragment of the polypeptide or a mutant thereof comprises an epitope having at least 7 amino acids.

[0044] (16) The composition according to any of (1), (12), (13), or (14) above, wherein each of the antibodies is a polyclonal antibody, a monoclonal antibody, a synthetic antibody, a recombinant antibody, a polyspecific antibody, or a single-chain antibody.

[0045] (17) The composition according to (1) above, which comprises at least two probes selected from the probes of group I or group II (f), (g), or (h) in combination.

[0046] (18) A kit for detecting, identifying, or predicting the presence or metastasis of kidney cancer in a subject in vitro, comprising one or more probes selected from the probes of group I or group II (0, (g), or (h) as defined in (1) above.

[0047] (19) The kit according to (18), which further comprises, as a probe, a polynucleotide consisting of the nucleotide sequence as shown in any of SEQ ID NOS: 11, 21, and 48 to 50, a polynucleotide consisting of a complementary sequence thereof, a polynucleotide hybridizing under stringent conditions to said polynucleotide, or a fragment comprising at least 15 continuous nucleotides thereof.

[0048] (20) The kit according to (18) or (19) above, wherein the probe is a polynucleotide consisting of the nucleotide sequence as shown in any of SEQ ID NOS: 1 to 10, 11, 12 to 20, 21, 22 to 47, and 48 to 50, a polynucleotide consisting of a complementary sequence thereof, a polynucleotide hybridizing under stringent conditions to said polynucleotide, or a fragment comprising at least 15 continuous nucleotides thereof.

[0049] (21) The kit according to any of (18) to (20) above, wherein the fragment of group I is a polynucleotide comprising at least 60 continuous nucleotides.

[0050] (22) The kit according to any of (18) to (20) above, wherein the fragment of group I is a polynucleotide comprising the nucleotide sequence as shown in any of SEQ ID NOS: 51 to 60, 61, 62 to 70, 71, 72 to 97, and 98 to 100 and comprising at least 60 continuous nucleotides in the nucleotide sequence as shown in any of SEQ ID NOS: 1 to 10, 11, 12 to 20, 21, 22 to 47, and 48 to 50 or a polynucleotide comprising a nucleotide sequence complementary thereto.

[0051] (23) The kit according to any of (18) to (20) above, wherein the fragment of group I is a polynucleotide comprising a nucleotide sequence as shown in any of SEQ ID NOS: 51 to 60, 61, 62 to 70, 71, 72 to 97, and 98 to 100 or a nucleotide sequence complementary thereto.

[0052] (24) The kit according to any of (18) to (20) above, wherein the fragment of group I is a polynucleotide comprising a nucleotide sequence as shown in any of SEQ ID NOS: 51 to 60, 61, 62 to 70, 71, 72 to 97, and 98 to 100.

[0053] (25) The kit according to (18) above, which comprises at least two or all polynucleotides each comprising a nucleotide sequence as shown in any of SEQ ID NOS: 51 to 60, 61, 62 to 70, 71, 72 to 97, and 98 to 100 or a complementary sequence of any thereof.

[0054] (26) The kit according to (18) above, which further comprises an antibody that binds specifically to at least one of a polypeptide as shown in any of SEQ ID NOS: 111, 121, and 148 to 150, a mutant of the polypeptide, and a fragment of the polypeptide; a fragment of the antibody; or a chemically modified derivative of the antibody, in addition to a probe or probes of group II (D.

[0055] (27) The kit according to (18) above, which further comprises an antibody that binds specifically to at least one of a polypeptide as shown in any of SEQ ID NOS: 152, 154, and 191, a mutant of the polypeptide, and a fragment of the polypeptide; a fragment of the antibody; or a chemically modified derivative of the antibody, in addition to a probe or probes of group II (g).

[0056] (28) The kit according to (18) above, which further comprises an antibody that binds specifically to at least one of a polypeptide as shown in any of SEQ ID NOS: 192 to 197, a mutant of the polypeptide, and a fragment of the polypeptide; a fragment of the antibody; or a chemically modified derivative of the antibody, in addition to a probe or probes of group II (h).

[0057] (29) The kit according to (18) above, wherein the probes are packaged in different containers, alone or in combination.

[0058] (30) A DNA chip for detecting, identifying, or predicting the presence or metastasis of kidney cancer in a subject in vitro, comprising one or more probes selected from the probes of group I (a) to (e) as defined in (1) above.

[0059] (31) The DNA chip according to (30) above, which further comprises a polynucleotide consisting of the nucleotide sequence as shown in any of SEQ ID NOS: 11, 21, and 48 to 50, a mutant of the polypeptide, and/or a fragment thereof.

[0060] (32) The DNA chip according to (30) above, which comprises at least two or all of the polynucleotides comprising a nucleotide sequence as shown in any of SEQ ID NOS: 51 to 60, 61, 62 to 70, 71, 72 to 97, and 98 to 100 or complementary sequences thereto.

[0061] (33) A method for detecting, identifying, or predicting the presence or metastasis of kidney cancer in vitro, comprising using a probe or probes selected from the probes of group I and/or group II (0, (g), and (h) as defined in (1) above to measure in vitro the presence, existing amount, or expression level of one or more kidney cancer-associated target nucleic acids in a biological sample from a subject.

[0062] (34) The method according to (33) above, wherein the measurement is carried out using a DNA chip.

[0063] (35) The method according to (33) above, wherein the presence or metastasis of kidney cancer is detected, identified, or predicted using changes compared with a control sample as an indication.

[0064] (36) The method according to (33) above, wherein the measurement is carried out by an immunological method.

[0065] (37) The method according to (36) above, wherein the measurement by the immunological method is carried out using an antibody of group II (0, (g), or (h), a fragment thereof, or a chemically modified derivative thereof.

[0066] (38) The method according to (37) above, wherein the antibody, fragment, or chemically modified derivative is labeled.

[0067] (39) The method according to (33) above, wherein the biological sample is a kidney tissue or a kidney cell, blood, plasma, serum, or urine.

[0068] (40) A method for detecting, identifying, or predicting the presence or metastasis of kidney cancer in vitro, comprising measuring in vitro the presence, existing amount, or expression level of one or more kidney cancer-associated target nucleic acids in a biological sample from a subject using the composition according to (1) above, the kit according to (18) above, or the DNA chip according to (30) above.

[0069] (41) A method for predicting in vitro a patient's prognosis and/or metastasis of kidney cancer by comparing the expression level of a target nucleic acid in a biological sample of kidney cancer cells obtained from a subject with that of the target nucleic acid in kidney cancer cells obtained from a patient population with poor prognosis and/or that of the target nucleic acid in kidney cancer cells obtained from a patient population with good prognosis using a probe or probes selected from group I as defined in (1) above, or the composition according to (1) above, the kit according to (18) above, or the DNA chip according to (30) above comprising the probe or probes, wherein the target nucleic acid can be detected by the polynucleotide contained in the composition, kit, or DNA chip or a mutant or fragment of such polynucleotide, and, when the expression level of the target nucleic acid in the subject is different from that in the patient population with good prognosis and/or that in the patient population with poor prognosis, the subject is identified to have a poor or good prognosis and/or the metastasis of kidney cancer is determined to have or have not occurred.

[0070] (42) The method according to (41) above, which involves the use of a DNA chip.

[0071] (43) The method according to (41) or (42), which comprises the steps of:

[0072] (1) measuring in vitro expression levels of target nucleic acids in a plurality of biological samples that are known to be kidney cancer cells obtained from a patient with a poor prognosis and/or kidney cancer cells obtained from a patient with a good prognosis using a probe or probes selected from group I as defined in (1) above, the composition of (1) above, the kit of (18) above, or the DNA chip of (30) above comprising the probe or probes;

[0073] (2) preparing a discriminant, a support vector machine, using, as training samples, the expression levels of the target nucleic acids as determined in step (1);

[0074] (3) measuring in vitro expression levels of the target nucleic acids in a biological sample obtained from the kidney cancer cells of the subject in the same manner as in step (1); and

[0075] (4) assigning the expression levels of the target nucleic acids identified in step (3) to the discriminant prepared in step (2) and, based on the results obtained with the use of the discriminant, predicting the prognosis for a subject and/or determining whether or not kidney cancer of the subject is metastatic or nonmetastatic, provided that the target nucleic acids can be detected by the polynucleotides, mutants thereof or fragments thereof contained in the composition, kit, or DNA chip.

[0076] (44) Use of a probe or probes selected from the probes of group I and/or group II as defined in (1) above, or of the composition of (1) above, the kit of (18) above, or the DNA chip of (30) above comprising the probe or probes, in detecting, identifying, or predicting in vitro the presence or metastasis of kidney cancer in a biological sample from a subject.

### DEFINITION

[0077] The terms as used herein comprise the definitions as set forth below.

[0078] The term “probe” as used herein refers to a nucleic acid, an antibody, or an equivalent thereof, which is for detecting, identifying, or predicting the presence or metastasis of kidney cancer, and which is capable of binding to a particular gene that is an kidney cancer-associated marker, or to a polypeptide encoded thereby.

[0079] The meanings of terms such as nucleotide, polynucleotide, amino acid, peptide, polypeptide, and protein, and their abbreviations are in accordance with common usage in the art.

[0080] The term “polynucleotide” as used herein refers to a nucleic acid including each of RNA and DNA. Such DNA includes cDNA, genomic DNA, and synthetic DNA. Such RNA includes total RNA, mRNA, rRNA, and synthetic RNA. The term “polynucleotide” is used interchangeably with the term “nucleic acid.”

[0081] The term “cDNA” as used herein refers to a full-length DNA strand of a sequence complementary to RNA resulting from gene expression, or a DNA fragment consisting of a partial sequence thereof. cDNA can be synthesized via reverse transcriptase-polymerase chain reaction (RT-PCR) using RNA as a template and a poly T primer.

[0082] The term “gene” as used herein refers to not only double-stranded DNA but also single-stranded DNA such as a plus-strand (or a sense strand) or a complementary strand (or an antisense strand) constituting double-stranded DNA. It is not particularly limited by the length of such strand. Accordingly, the term “gene” refers to any of double-stranded DNA (including human genomic DNA), single-stranded DNA (plus-strand) (including cDNA), single-stranded DNA having a sequence complementary to the plus-strand (complementary strand), and a fragment thereof, unless otherwise specified. Such “gene” includes not only a “gene” represented by a specific nucleotide sequence (or a SEQ ID NO.) but also another “gene” encoding a protein, which has a biological function equivalent to that of a protein encoded by said gene, such as a homolog, a mutant such as a splice mutant, and a derivative. Specific examples of the “genes” encoding such homolog, mutant, or derivative include “genes” each having a nucleotide sequence which hybridizes to a sequence complementary to a specific nucleotide sequence as shown in any of SEQ ID NOS: 1 to 50 under stringent conditions as described below.

[0083] Examples of human-derived protein homologs or genes encoding the same include proteins or genes derived from other organism species corresponding to the human proteins or human genes encoding the same. Such protein homologs or gene homologs can be identified by HomoloGene (http://www.ncbi.nlm.nih.gov/homoloGene/). Specifically, a certain human amino acid or nucleotide sequence can be subjected to the BLAST programs (Karlin, S. et al., Proceedings of the National Academic Sciences, U.S.A., 1993, vol. 90, pp. 5873-5877, http://www.ncbi.nlm.nih.gov/BLAST/) to obtain the accession number of the corresponding sequence (i.e., the sequence exhibiting the highest score, E-value 0, and identity 100%). Examples of the known BLAST programs include BLASTN (gene) and BLASTX (protein). When searching for a gene, for example, the accession number obtained from the above-mentioned BLAST search is inputted into the UniGene (http://www.ncbi.nlm.nih.gov/UniGene/), and the obtained UniGeneClusterID (the number identified with “Hs.”) is then inputted into the HomoloGene. From the list that shows the correlation of gene homologs between the genes of other organism species and the human genes, a gene of the other organism species can be selected as a gene homolog corresponding to the human gene represented by a given nucleotide sequence. In this procedure, the FASTA program (http://www.ddbj.nig.ac.jp/search/fasta-e.html) may be used instead of the BLAST program.

[0084] Functional regions of “genes” are not limited, and examples thereof include expression-control regions, coding regions, and exon or intron regions.

[0085] The term “transcription product” as used herein refers to messenger RNA (mRNA) which is synthesized from the DNA sequence of a gene as a template. Messenger RNA is synthesized by binding of RNA polymerase to a site called promoter, which is located upstream of the gene of interest, and subsequently by binding of ribonucleotides to the 3′ end so as to be complementary to the nucleotide sequence of DNA. Such messenger RNA contains not only the gene of interest but also a full-length sequence spanning from a transcription initiation site to the terminus of a poly A sequence including expression control region, coding region, and exon or intron region.

[0086] The term “translation product” as used herein refers to a protein which is synthesized based on the information of messenger RNA synthesized via transcription regardless of modification such as splicing. During the translation process of messenger RNA, ribosome first binds to messenger RNA, and amino acids are then linked in accordance with the nucleotide sequence of messenger RNA, thereby leading to the synthesis of a protein.

[0087] The term “primer” as used herein refers to a continuous polynucleotide that specifically recognizes and amplifies RNA resulting from gene expression or a polynucleotide derived therefrom, and/or a polynucleotide complementary thereto.

[0088] The complementary polynucleotide (i.e., a complementary strand or reverse strand) refers to a polynucleotide that is basically complementary to the full-length sequence of a polynucleotide having a nucleotide sequence as shown in a given SEQ ID NO. or a partial sequence thereof (herein, conveniently referred to as a “plus strand”), on the basis of the base pairing such as A:T(U) or G:C. Such a complementary strand, however, is not limited to a sequence completely complementary to the nucleotide sequence of a plus strand of interest; that is, the complementary strand may have such a complementarity that it can hybridize to the plus strand under stringent conditions.

[0089] As used herein, the “stringent conditions” means such conditions that a probe can hybridize to a target sequence with a higher degree of detection when compared with its hybridization to other sequences (e.g., at least twice the background). Stringent conditions are dependent on the sequence of a target, varying depending on the environment where hybridization takes place. By controlling stringency of hybridization and/or washing conditions, a target sequence that is 100% complementary to the probe can be identified.

[0090] As used herein, the term “mutant” in case of a nucleic acid refers to a naturally-occurring mutant resulting from polymorphism, mutation, selective splicing during transcription, or the like, a homolog thereof, a mutant based on degeneracy of genetic cord, a mutant comprising a deletion, substitution, addition, or insertion of one or more nucleotides, preferably one or several nucleotides, in a nucleotide sequence as shown in any of SEQ ID NOS: 1 to 50 or a partial sequence thereof, a mutant having at least about 80%, at least about 85%, preferably at least about 90%, more preferably at least about 95%, at least about 97%, at least about 98%, or at least about 99% identity with said nucleotide sequence or said partial sequence thereof, or a nucleic acid mutant that hybridizes to a polynucleotide or oligonucleotide comprising said nucleotide sequence or said partial sequence thereof under the stringent conditions as defined above. On the other hand, a “mutant” in case of a protein or peptide refers to a mutant comprising a deletion, substitution, addition, or insertion of one or more amino acids, preferably one or several amino acids, in an amino acid sequence as shown in any of SEQ ID NOS: 101 to 197 or a partial sequence thereof, or a mutant having a % identity of at least about 80%, at least about 85%, at least about 90%, at least about 95%, at least about 97%, at least about 98%, or at least about 99% with said amino acid sequence or said partial sequence thereof.

[0091] The term “several” as used herein means an integer of about 10, 9, 8, 7, 6, 5, 4, 3, or 2.

[0092] As used herein, the “% identity” can be identified by using a protein or gene searching system such as BLAST or FASTA as mentioned above, with introducing a gap (Karlin, S. et al., 1993, Proceedings of the National Academic Sciences, U.S.A., vol. 90, pp. 5873-5877; Altschul, S. F. et al., 1990, Journal of Molecular Biology, vol. 215, pp. 403-410; Pearson, W. R. et al., 1988, Proceedings of the National Academic Sciences, U.S.A., vol. 85, pp. 2444-2448).

[0093] As used herein, the term “derivative” in case of a nucleic acid refers to a derivative labeled with fluorophore or the like, a derivative comprising a modified nucleotide (e.g., a nucleotide having a functional group such as halogen, alkyl (e.g., methyl), alkoxy (e.g., methoxy), thio, or carboxymethyl; or a nucleotide comprising, for example, reconstitution of a base, saturation of a double bond, deamination, or substitution of oxygen by sulfur), or the like. On the other hand, a “derivative” in case of a protein (including an antibody) refers to a derivative labeled with an enzyme, fluorophore, or radioisotope, or a chemically modified derivative, such as an acetylated, acylated, alkylated, phosphorylated, sulfated, or glycosylated derivative.

[0094] As used herein, the term “a composition for diagnosis (or detection or identification)” or “a composition for identifying the disease” refers to a composition that is directly or indirectly employed for predicting the prognosis for a kidney cancer patient and/or for diagnosing the development of kidney cancer, the degree of advancement, the presence or absence of metastasis of kidney cancer, or the degree of amelioration, or for screening for candidate substances useful for preventing, ameliorating, or treating kidney cancer. The composition comprises a nucleotide, an oligonucleotide, or a polynucleotide, which can specifically recognize and bind to a gene whose expression varies or fluctuates in vivo, in particularly kidney tissue, tissue associated with the development of the kidney cancer, and an antibody that can detect a protein as a translation product of the gene. Such nucleotide, oligonucleotide and polynucleotide can be effectively used as a probe for detecting the aforementioned gene that is expressed in vivo, in tissue, or in a cell, based on the aforementioned properties, or as a primer for amplifying the gene expressed in vivo. As used herein, the term “composition” refers to a composition comprising a single probe according to the present invention or a probe mixture comprising two or more different probes. Such composition can be in any form, including a solid matter (e.g., a freeze-dried product) or a solution (e.g., an aqueous solution or buffer). Also, such composition can comprise additives such as a stabilizer and a preservative as long as such additive would not influence the analysis, according to need.

[0095] As used herein, the term “biological tissue” to be detected or diagnosed refers to a sample (or specimen) obtained from a living body, in which the expression pattern of the target gene of the invention changes with the development of kidney cancer, or the amount of the target polypeptide of the present invention varies compared with a normal control sample. Examples of biological samples include kidney tissue, tissue obtained from peripheral lymph nodes, or another organ suspected of being at risk for metastasis, cells derived from such tissue, and body fluid such as blood.

[0096] The term “specifically bind(s)” as used herein means that an antibody or a fragment thereof forms an antigen-antibody complex with only the target polypeptide, or a mutant or fragment thereof, of the invention, but does not substantially form such a complex with other peptidic or polypeptidic substances. The term “substantially” as used herein means that formation of a nonspecific complex may occur, although its degree is small.

[0097] The term “epitope” as used herein refers to an antigenic or immunogenic partial amino acid region (or an antigenic determinant) of the target polypeptide of the invention or a mutant or fragment thereof. The epitope is generally composed of at least 5 amino acids, preferably at least 7 amino acids, and more preferably at least 10 amino acids.

[0098] The term “prognosis” as used herein refers to a probability of survival that is indicated by a survival curve plotted by the Kaplan-Meier method (e.g., BMJ, 1998, 317: 1572). The patients with “good prognosis” refers to patients who exhibit a high survival ratio with a significant difference of p<0.05, which is obtained by classifying the kidney cancer patients in accordance with some sort of clinical information, the survival curves are plotted by the Kaplan-Meier method according to the classification, and the differences are determined by a statistical technique. Similarly, patients with “poor prognosis” refer to patients who exhibit a low survival ratio with a significant difference of p<0.05, which is obtained by classifying the kidney cancer patients in accordance with some sort of clinical information, the survival curves are plotted by the Kaplan-Meier method according to the classification, and the differences are determined by a statistical technique. Since the presence or absence of cancer metastasis is a factor that influences the patient's prognosis, the prediction of the prognosis is partly correlated with the prediction of cancer metastasis.

[0099] The term “PABPN1 gene” or “PABPN1” as used herein includes a gene (or DNA) encoding the Poly(A)-Binding Protein, Nuclear 1 gene (or DNA) as shown in a given nucleotide sequence (i.e., SEQ ID NO: 1), a homolog thereof, a mutant thereof, a derivative thereof, or the like, unless it is defined by a SEQ ID NO. Specifically, it includes the PABPN1 gene (Ensembl Gene ID, ENSG00000100836) as shown in SEQ ID NO: 1 and homologs thereof derived from other organism species. The PABPN1 gene can be obtained by the method disclosed in, for example, Brais, B. et al., 1998, Nature genetics, vol. 18, pp. 164-167. The fact that variations in the PABPN1 gene expression can become an indication of metastasis of kidney cancer is not known.

[0100] The term “PINK1 gene” or “PINK1” as used herein includes a gene (or DNA) encoding the PTEN Induced Putative Kinase 1 gene (or DNA) as shown in a given nucleotide sequence (i.e., SEQ ID NO: 2), a homolog thereof, a mutant thereof, a derivative thereof, or the like, unless it is defined by a SEQ ID NO. Specifically, it includes the PINK1 gene (Ensembl Gene ID, ENSG00000180056) as shown in SEQ ID NO: 2 and homologs thereof derived from other organism species. The PINK1 gene can be obtained by the method disclosed in, for example, Unoki, M. et al., 2001, Oncogene, vol. 20, pp. 4457-4465. The fact that variations in the PINK1 gene expression can become an indication of metastasis of kidney cancer is not known.

[0101] The term “TFF2 gene” or “TFF2” as used herein includes a gene (or DNA) encoding the Trefoil Factor 2 gene (or DNA) as shown in a given nucleotide sequence (i.e., SEQ ID NO: 3), a homolog thereof, a mutant thereof, a derivative thereof, or the like, unless it is defined by a SEQ ID NO. Specifically, it includes the TFF2 gene (Ensembl Gene ID, ENSG00000160181) as shown in SEQ ID NO: 3 and homologs thereof derived from other organism species. The TFF2 gene can be obtained by the method disclosed in, for example, Tomasetto, C. et al., 1990, EMBO Journal, vol. 9, pp. 407-414. The fact that variations in the TFF2 gene expression can become an indication of metastasis of kidney cancer is not known.

[0102] The term “EIF3S9 gene” or “EIF3S9” as used herein includes a gene (or DNA) encoding the Eukaryotic Translation Initiation Factor 3 Subunit 9 gene (or DNA) as shown in a given nucleotide sequence (i.e., SEQ ID NO: 4), a homolog thereof, a mutant thereof, a derivative thereof, or the like, unless it is defined by a SEQ ID NO. Specifically, it includes the EIF3S9 gene (Ensembl Gene ID, ENSG00000106263) as shown in SEQ ID NO: 4 and homologs thereof derived from other organism species. The EIF3S9 gene can be obtained by the method disclosed in, for example, Methot, N. et al., 1997, Journal of Biological Chemistry, vol. 272, pp. 1110-1116. The fact that variations in the EIF3S9 gene expression can become an indication of metastasis of kidney cancer is not known.

[0103] The term “MAX gene” or “MAX” as used herein includes a gene (or DNA) encoding the MAX Protein gene (or DNA) as shown in a given nucleotide sequence (i.e., SEQ ID NO: 5), a homolog thereof, a mutant thereof, a derivative thereof, or the like, unless it is defined by a SEQ ID NO. Specifically, it includes the MAX gene (Ensembl Gene ID, ENSG00000125952) as shown in SEQ ID NO: 5 and homologs thereof derived from other organism species. The MAX gene can be obtained by the method disclosed in, for example, Wagner, A. et al., 1992, Proceedings of the National Academic Sciences, U.S.A., vol. 89, pp. 3111-3115. The fact that variations in the MAX gene expression can be an indication of metastasis of kidney cancer is not known.

[0104] The term “MLL4 gene” or “MLL4” as used herein includes a gene (or DNA) encoding the Trithorax Homolog 2 gene (or DNA) as shown in a given nucleotide sequence (i.e., SEQ ID NO: 6), a homolog thereof, a mutant thereof, a derivative thereof, or the like, unless it is defined by a SEQ ID NO. Specifically, it includes the MLL4 gene (Ensembl Gene ID, ENSG00000105663) as shown in SEQ ID NO: 6 and homologs thereof derived from other organism species. The MLL4 gene can be obtained by the method disclosed in, for example, Nagase, T. et al., 1997, DNA Research, vol. 4, pp. 141-150. The fact that variations in the MLL4 gene expression can become an indication of metastasis of kidney cancer is not known.

[0105] The term “CACNB2 gene” or “CACNB2” as used herein includes a gene (or DNA) encoding the Dihydropyridine-Sensitive L-Type, Calcium Channel Beta-2 Subunit gene (or DNA) as shown in a given nucleotide sequence (i.e., SEQ ID NO: 7), a homolog thereof, a mutant thereof, a derivative thereof, or the like, unless it is defined by a SEQ ID NO. Specifically, it includes the CACNB2 gene (Ensembl Gene ID, ENSG00000165995) as shown in SEQ ID NO: 7 and homologs thereof derived from other organism species. The CACNB2 gene can be obtained by the method disclosed in, for example, Rosenfeld, M. et al., 1993, Annals of Neurology., vol. 33, pp. 113-120. The fact that variations in the CACNB2 gene expression can become an indication of metastasis of kidney cancer is not known.

[0106] The term “ZMYND11 gene” or “ZMYND11” as used herein includes a gene (or DNA) encoding the Adenovirus 5 E1A-Binding Protein gene (or DNA) as shown in a given nucleotide sequence (i.e., SEQ ID NO: 8), a homolog thereof, a mutant thereof, a derivative thereof, or the like, unless it is defined by a SEQ ID NO. Specifically, it includes the ZMYND11 gene (Ensembl Gene ID, ENSG00000015171) as shown in SEQ ID NO: 8 and homologs thereof derived from other organism species. The ZMYND11 gene can be obtained by the method disclosed in, for example, Hateboer, G. et al., 1995, EMBO Journal, vol. 14, pp. 3159-3169. The fact that variations in the ZMYND11 gene expression can become an indication of metastasis of kidney cancer is not known.

[0107] The term “BAT2 gene” or “BAT2” as used herein includes a gene (or DNA) encoding the Adenovirus 5 E1A-Binding Protein gene (or DNA) as shown in a given nucleotide sequence (i.e., SEQ ID NO: 9), a homolog thereof, a mutant thereof, a derivative thereof, or the like, unless it is defined by a SEQ ID NO. Specifically, it includes the BAT2 gene (Ensembl Gene ID, ENSG00000111960) as shown in SEQ ID NO: 9 and homologs thereof derived from other organism species. The BAT2 gene can be obtained by the method disclosed in, for example, Banerji, J. et al., 1990, Proceedings of the National Academic Sciences, U.S.A., vol. 87, pp. 2374-2378. The fact that variations in the BAT2 gene expression can become an indication of metastasis of kidney cancer is not known.

[0108] The term “NRBP gene” or “NRBP” as used herein includes a gene (or DNA) encoding the Nuclear Receptor Binding Protein gene (or DNA) as shown in a given nucleotide sequence (i.e., SEQ ID NO: 10), a homolog thereof, a mutant thereof, a derivative thereof, or the like, unless it is defined by a SEQ ID NO. Specifically, it includes the NRBP gene (Ensembl Gene ID, ENSG00000115216) as shown in SEQ ID NO: 10 and homologs thereof derived from other organism species. The NRBP gene can be obtained by the method disclosed in, for example, Hooper, J. D. et al., 2000, Genomics, vol. 66, pp. 113-118. The fact that variations in the NRBP gene expression can become an indication of metastasis of kidney cancer is not known.

[0109] The term “MCM3AP gene” or “MCM3AP” as used herein includes a gene (or DNA) encoding the 80 KDa MCM3-Associated Protein gene (or DNA) as shown in a given nucleotide sequence (i.e., SEQ ID NO: 11), a homolog thereof, a mutant thereof, a derivative thereof, or the like, unless it is defined by a SEQ ID NO. Specifically, it includes the MCM3AP gene (Ensembl Gene ID, ENSG00000160294) as shown in SEQ ID NO: 11 and homologs thereof derived from other organism species. The MCM3AP gene can be obtained by the method disclosed in, for example, Takei, Y. et al., 1998, Journal of Biological Chemistry, vol. 273, pp. 22177-22180. The possibility that variations in the MCM3AP gene expression may become an indication of metastasis of kidney cancer is presumed in JP Patent Publication (kohyo) No. 2005-520536 (A), although it has not practically been verified.

[0110] The term “COL4A1 gene” or “COL4A1” as used herein includes a gene (or DNA) encoding the Collagen Alpha 1(IV) Chain gene (or DNA) as shown in a given nucleotide sequence (i.e., SEQ ID NO: 12), a homolog thereof, a mutant thereof, a derivative thereof, or the like, unless it is defined by a SEQ ID NO. Specifically, it includes the COL4A1 gene (Ensembl Gene ID, ENSG00000139825) as shown in SEQ ID NO: 12 and homologs thereof derived from other organism species. The COL4A1 gene can be obtained by the method disclosed in, for example, Solomon, E. et al., 1985, Proceedings of the National Academic Sciences, U.S.A., vol. 82, pp. 3330-3334. The fact that variations in the COL4A1 gene expression can become an indication of metastasis of kidney cancer is not known.

[0111] The term “MKNK1 gene” or “MKNK1” as used herein includes a gene (or DNA) encoding the MAP Kinase-Interacting Serine/Threonine Kinase 1 gene (or DNA) as shown in a given nucleotide sequence (i.e., SEQ ID NO: 13), a homolog thereof, a mutant thereof, a derivative thereof, or the like, unless it is defined by a SEQ ID NO. Specifically, it includes the MKNK1 gene (Ensembl Gene ID, ENSG00000079277) as shown in SEQ ID NO: 13 and homologs thereof derived from other organism species. The MKNK1 gene can be obtained by the method disclosed in, for example, Fukunaga, R. et al., 1997, EMBO Journal, vol. 16, pp. 1921-1933. The fact that variations in the MKNK1 gene expression can become an indication of metastasis of kidney cancer is not known.

[0112] The term “BBC3 gene” or “BBC3” as used herein includes a gene (or DNA) encoding the BCL2 Binding Component 3 gene (or DNA) as shown in a given nucleotide sequence (i.e., SEQ ID NO: 14), a homolog thereof, a mutant thereof, a derivative thereof, or the like, unless it is defined by a SEQ ID NO. Specifically, it includes the BBC3 gene (Ensembl Gene ID, ENSG00000105327) as shown in SEQ ID NO: 14 and homologs thereof derived from other organism species. The BBC3 gene can be obtained by the method disclosed in, for example, Yu, J. et al., 2001, Molecular Cell, vol. 7, pp. 673-682. The fact that variations in the BBC3 gene expression can become an indication of metastasis of kidney cancer is not known.

[0113] The term “FLJ10359 gene” or “FLJ10359” as used herein includes a gene (or DNA) encoding the Protein BAP28 gene (or DNA) as shown in a given nucleotide sequence (i.e., SEQ ID NO: 15), a homolog thereof, a mutant thereof, a derivative thereof, or the like, unless it is defined by a SEQ ID NO. Specifically, it includes the FLJ10359 gene (Ensembl Gene ID, ENSG00000119285) as shown in SEQ ID NO: 15 and homologs thereof derived from other organism species.

[0114] The term “DPT gene” or “DPT” as used herein includes a gene (or DNA) encoding the Dermatopontin gene (or DNA) as shown in a given nucleotide sequence (i.e., SEQ ID NO: 16), a homolog thereof, a mutant thereof, a derivative thereof, or the like, unless it is defined by a SEQ ID NO. Specifically, it includes the DPT gene (Ensembl Gene ID, ENSG00000143196) as shown in SEQ ID NO: 16 and homologs thereof derived from other organism species. The DPT gene can be obtained by the method disclosed in, for example, Superti-Fruga, A. et al., 1993, Genomics, vol. 17, pp. 463-467. The fact that variations in the DPT gene expression can become an indication of metastasis of kidney cancer is not known.

[0115] The term “C10orf76 gene” or “C10orf76” as used herein includes a gene (or DNA) encoding the gene (or DNA) as shown in a given nucleotide sequence (i.e., SEQ ID NO: 17), a homolog thereof, a mutant thereof, a derivative thereof, or the like, unless it is defined by a SEQ ID NO. Specifically, it includes the C10orf76 gene (Ensembl Gene ID, ENSG00000120029) as shown in SEQ ID NO: 17 and homologs thereof derived from other organism species.

[0116] The term “DIA1 gene” or “DIA1” as used herein includes a gene (or DNA) encoding the NADH-Cytochrome B5 Reductase gene (or DNA) as shown in a given nucleotide sequence (i.e., SEQ ID NO: 18), a homolog thereof, a mutant thereof, a derivative thereof, or the like, unless it is defined by a SEQ ID NO. Specifically, it includes the DIA1 gene (Ensembl Gene ID, ENSG00000100243) as shown in SEQ ID NO: 18 and homologs thereof derived from other organism species. The DIA1 gene can be obtained by the method disclosed in, for example, Du, M. et al., 1997, Biochemical Biophysical Research Communication, vol. 235, pp. 779-783. The fact that variations in the DIA1 gene expression can become an indication of metastasis of kidney cancer is not known.

[0117] The term “PBK gene” or “PBK” as used herein includes a gene (or DNA) encoding the T-LAK Cell-Originated Protein Kinase gene (or DNA) as shown in a given nucleotide sequence (i.e., SEQ ID NO: 19), a homolog thereof, a mutant thereof, a derivative thereof, or the like, unless it is defined by a SEQ ID NO. Specifically, it includes the PBK gene (Ensembl Gene ID, ENSG00000168078) as shown in SEQ ID NO: 19 and homologs thereof derived from other organism species. The PBK gene can be obtained by the method disclosed in, for example, Gaudet, S. et al., 2000, Proceedings of the National Academic Sciences, U.S.A., vol. 97, pp. 5167-5172. The fact that variations in the PBK gene expression can become an indication of metastasis of kidney cancer is not known.

[0118] The term “PRKD2 gene” or “PRKD2” as used herein includes a gene (or DNA) encoding the Protein Kinase C, D2 Type gene (or DNA) as shown in a given nucleotide sequence (i.e., SEQ ID NO: 20), a homolog thereof, a mutant thereof, a derivative thereof, or the like, unless it is defined by a SEQ ID NO. Specifically, it includes the PRKD2 gene (Ensembl Gene ID, ENSG00000105287) as shown in SEQ ID NO: 20 and homologs thereof derived from other organism species. The PRKD2 gene can be obtained by the method disclosed in, for example, Sturany, S. et al., 2001, Journal of Biological Chemistry, vol. 276, pp. 3310-3318. The fact that variations in the PRKD2 gene expression can become an indication of metastasis of kidney cancer is not known.

[0119] The term “KRT19 gene” or “KRT19” as used herein includes a gene (or DNA) encoding the Keratin, Type I Cytoskeletal 19 gene (or DNA) as shown in a given nucleotide sequence (i.e., SEQ ID NO: 21), a homolog thereof, a mutant thereof, a derivative thereof, or the like, unless it is defined by a SEQ ID NO. Specifically, it includes the KRT19 gene (Ensembl Gene ID, ENSG00000171345) as shown in SEQ ID NO: 21 and homologs thereof derived from other organism species. The KRT19 gene can be obtained by the method disclosed in, for example, Bader, B. et al., 1986, EMBO Journal, vol. 5, pp. 1865-1875. The fact that variations in the KRT19 gene expression can become an indication of kidney cancer is deduced in JP Patent Publication (kohyo) No. 2005-507997 (A), although it has not yet been verified.

[0120] The term “FLJ23436 gene” or “FLJ23436” as used herein includes a gene (or DNA) encoding the gene (or DNA) as shown in a given nucleotide sequence (i.e., SEQ ID NO: 22), a homolog thereof, a mutant thereof, a derivative thereof, or the like, unless it is defined by a SEQ ID NO. Specifically, it includes the FLJ23436 gene (Ensembl Gene ID, ENSG00000169957) as shown in SEQ ID NO: 22 and homologs thereof derived from other organism species. The FLJ23436 gene can be obtained by the method disclosed in, for example, Beausoleil, S. A. et al., 2004, Proceedings of the National Academic Sciences, U.S.A., vol. 101, pp. 12130-12135. The fact that variations in the FLJ23436 gene expression can become an indication of metastasis of kidney cancer is not known.

[0121] The term “NPHS2 gene” or “NPHS2” as used herein includes a gene (or DNA) encoding the Podocin gene (or DNA) as shown in a given nucleotide sequence (i.e., SEQ ID NO: 23), a homolog thereof, a mutant thereof, a derivative thereof, or the like, unless it is defined by a SEQ ID NO. Specifically, it includes the NPHS2 gene (Ensembl Gene ID, ENSG00000116218) as shown in SEQ ID NO: 23 and homologs thereof derived from other organism species. The NPHS2 gene can be obtained by the method disclosed in, for example, Kestila, M. et al., 1998, Molecular Cell, vol. 1, pp. 575-582. The fact that variations in the NPHS2 gene expression can become an indication of metastasis of kidney cancer is not known.

[0122] The term “C3orf14 gene” or “C3orf14” as used herein includes a gene (or DNA) encoding the HT021 gene (or DNA) as shown in a given nucleotide sequence (i.e., SEQ ID NO: 24), a homolog thereof, a mutant thereof, a derivative thereof, or the like, unless it is defined by a SEQ ID NO. Specifically, it includes the C3orf14 gene (Ensembl Gene ID, ENSG00000114405) as shown in SEQ ID NO: 24 and homologs thereof derived from other organism species.

[0123] The term “AGTR2 gene” or “AGTR2” as used herein includes a gene (or DNA) encoding the Type-2 Angiotensin II Receptor gene (or DNA) as shown in a given nucleotide sequence (i.e., SEQ ID NO: 25), a homolog thereof, a mutant thereof, a derivative thereof, or the like, unless it is defined by a SEQ ID NO. Specifically, it includes the AGTR2 gene (Ensembl Gene ID, ENSG00000180772) as shown in SEQ ID NO: 25 and homologs thereof derived from other organism species. The AGTR2 gene can be obtained by the method disclosed in, for example, Koike, G et al., 1994, Biochemical Biophysical Research Communication, vol. 203, pp. 1842-1850. The fact that variations in the AGTR2 gene expression can become an indication of metastasis of kidney cancer is not known.

[0124] The term “HTR1F gene” or “HTR1F” as used herein includes a gene (or DNA) encoding the 5-Hydroxytryptamine 1F Receptor gene (or DNA) as shown in a given nucleotide sequence (i.e., SEQ ID NO: 26), a homolog thereof, a mutant thereof, a derivative thereof, or the like, unless it is defined by a SEQ ID NO. Specifically, it includes the HTR1F gene (Ensembl Gene ID, ENSG00000179097) as shown in SEQ ID NO: 26 and homologs thereof derived from other organism species. The HTR1F gene can be obtained by the method disclosed in, for example, Lovenberg, T. W. et al., 1993, Proceedings of the National Academic Sciences, U.S.A., vol. 90, pp. 2184-2188. The fact that variations in the HTR1F gene expression can become an indication of metastasis of kidney cancer is not known.

[0125] The term “KIF3B gene” or “KIF3B” as used herein includes a gene (or DNA) encoding the Kinesin-Like Protein KIF3B gene (or DNA) as shown in a given nucleotide sequence (i.e., SEQ ID NO: 27), a homolog thereof, a mutant thereof, a derivative thereof, or the like, unless it is defined by a SEQ ID NO. Specifically, it includes the KIF3B gene (Ensembl Gene ID, ENSG00000101350) as shown in SEQ ID NO: 27 and homologs thereof derived from other organism species. The KIF3B gene can be obtained by the method disclosed in, for example, Nagase, T. et al., 1997, DNA Research, vol. 4, pp. 141-150. The fact that variations in the KIF3B gene expression can become an indication of metastasis of kidney cancer is not known.

[0126] The term “DCN gene” or “DCN” as used herein includes a gene (or DNA) encoding the Decorin gene (or DNA) as shown in a given nucleotide sequence (i.e., SEQ ID NO: 28), a homolog thereof, a mutant thereof, a derivative thereof, or the like, unless it is defined by a SEQ ID NO. Specifically, it includes the DCN gene (Ensembl Gene ID, ENSG00000011465) as shown in SEQ ID NO: 28 and homologs thereof derived from other organism species. The DCN gene can be obtained by the method disclosed in, for example, Danielson, K. G et al., 1993, Genomics, vol. 15, pp. 146-160. The fact that variations in the DCN gene expression can become an indication of metastasis of kidney cancer is not known.

[0127] The term “STK22C gene” or “STK22C” as used herein includes a gene (or DNA) encoding the Testis-Specific Serine/Threonine Kinase 22C gene (or DNA) as shown in a given nucleotide sequence (i.e., SEQ ID NO: 29), a homolog thereof, a mutant thereof, a derivative thereof, or the like, unless it is defined by a SEQ ID NO. Specifically, it includes the STK22C gene (Ensembl Gene ID, ENSG00000162526) as shown in SEQ ID NO: 29 and homologs thereof derived from other organism species. The STK22C gene can be obtained by the method disclosed in, for example, Visconti, P. E. et al., 2001, Genomics, vol. 77, pp. 163-170. The fact that variations in the STK22C gene expression can become an indication of metastasis of kidney cancer is not known.

[0128] The term “DKFZp566C0424 gene” or “DKFZp566C0424” as used herein includes a gene (or DNA) encoding the Putative MAPK Activating Protein PM20 gene (or DNA) as shown in a given nucleotide sequence (i.e., SEQ ID NO: 30), a homolog thereof, a mutant thereof, a derivative thereof, or the like, unless it is defined by a SEQ ID NO. Specifically, it includes the DKFZp566C0424 gene (ENSG00000055070) as shown in SEQ ID NO: 30 and homologs thereof derived from other organism species. The DKFZp566C0424 gene can be obtained by the method disclosed in, for example, Visconti, P. E. et al., 2001, Genomics, vol. 77, pp. 163-170. The fact that variations in the DKFZp566C0424 gene expression can become an indication of metastasis of kidney cancer is not known.

[0129] The term “CNR1 gene” or “CNR1” as used herein includes a gene (or DNA) encoding the Cannabinoid Receptor 1 gene (or DNA) as shown in a given nucleotide sequence (i.e., SEQ ID NO: 31), a homolog thereof, a mutant thereof, a derivative thereof, or the like, unless it is defined by a SEQ ID NO. Specifically, it includes the CNR1 gene (Ensembl Gene ID, ENSG00000118432) as shown in SEQ ID NO: 31 and homologs thereof derived from other organism species. The CNR1 gene can be obtained by the method disclosed in, for example, Matsuda, L. A. et al., 1990, Nature, vol. 346, pp. 561-564. The fact that variations in the CNR1 gene expression can become an indication of metastasis of kidney cancer is not known.

[0130] The term “HOMER3 gene” or “HOMER3” as used herein includes a gene (or DNA) encoding the HOMER, Neuronal Immediate Early Gene, 3 gene (or DNA) as shown in a given nucleotide sequence (i.e., SEQ ID NO: 32), a homolog thereof, a mutant thereof, a derivative thereof, or the like, unless it is defined by a SEQ ID NO. Specifically, it includes the HOMER3 gene (Ensembl Gene ID, ENSG00000051128) as shown in SEQ ID NO: 32 and homologs thereof derived from other organism species. The HOMER3 gene can be obtained by the method disclosed in, for example, Xiao, B. et al., 2001, Neuron, vol. 21, pp. 707-716. The fact that variations in the HOMER3 gene expression can become an indication of metastasis of kidney cancer is not known.

[0131] The term “GPR2 gene” or “GPR2” as used herein includes a gene (or DNA) encoding the C-C Chemokine Receptor Type 10 gene (or DNA) as shown in a given nucleotide sequence (i.e., SEQ ID NO: 33), a homolog thereof, a mutant thereof, a derivative thereof, or the like, unless it is defined by a SEQ ID NO. Specifically, it includes the GPR2 gene (Ensembl Gene ID, ENSG00000177032) as shown in SEQ ID NO: 33 and homologs thereof derived from other organism species. The GPR2 gene can be obtained by the method disclosed in, for example, Marchese, A. et al., 1994, Genomics, vol. 23, pp. 609-618. The fact that variations in the GPR2 gene expression can become an indication of metastasis of kidney cancer is not known.

[0132] The term “FLJ12442 gene” or “FLJ12442” as used herein includes a gene (or DNA) encoding the gene (or DNA) as shown in a given nucleotide sequence (i.e., SEQ ID NO: 34), a homolog thereof, a mutant thereof, a derivative thereof, or the like, unless it is defined by a SEQ ID NO. Specifically, it includes the FLJ12442 gene (Ensembl Gene ID, ENSG00000168268) as shown in SEQ ID NO: 34 and homologs thereof derived from other organism species. The FLJ12442 gene can be obtained by the method disclosed in, for example, Ota, T. et al., 2004, Nature Genetics, vol. 36, pp. 40-45. The fact that variations in the FLJ12442 gene expression can become an indication of metastasis of kidney cancer is not known.

[0133] The term “XLKD1 gene” or “XLKD1” as used herein includes a gene (or DNA) encoding the Extracellular Link Domain Containing 1 gene (or DNA) as shown in a given nucleotide sequence (i.e., SEQ ID NO: 35), a homolog thereof, a mutant thereof, a derivative thereof, or the like, unless it is defined by a SEQ ID NO. Specifically, it includes the XLKD1 gene (Ensembl Gene ID, ENSG00000133800) as shown in SEQ ID NO: 35 and homologs thereof derived from other organism species. The XLKD1 gene can be obtained by the method disclosed in, for example, Banerji, S. et al., 1999, Journal of Cellular Biology, vol. 144, pp. 1789-801. The fact that variations in the XLKD1 gene expression can become an indication of metastasis of kidney cancer is not known.

[0134] The term “CASKIN2 gene” or “CASKIN2” as used herein includes a gene (or DNA) encoding the CASK-Interacting Protein 2 gene (or DNA) as shown in a given nucleotide sequence (i.e., SEQ ID NO: 36), a homolog thereof, a mutant thereof, a derivative thereof, or the like, unless it is defined by a SEQ ID NO. Specifically, it includes the CASKIN2 gene (Ensembl Gene ID, ENSG00000177303) as shown in SEQ ID NO: 36 and homologs thereof derived from other organism species. The CASKIN2 gene can be obtained by the method disclosed in, for example, Strausberg, R. L. et al., 2002, Proceedings of the National Academic Sciences, U.S.A., vol. 99, pp. 16899-16903. The fact that variations in the CASKIN2 gene expression can become an indication of metastasis of kidney cancer is not known.

[0135] The term “COL5A2 gene” or “COL5A2” as used herein includes a gene (or DNA) encoding the Collagen Alpha 2(V) Chain Protein gene (or DNA) as shown in a given nucleotide sequence (i.e., SEQ ID NO: 37), a homolog thereof, a mutant thereof, a derivative thereof, or the like, unless it is defined by a SEQ ID NO. Specifically, it includes the COL5A2 gene (Ensembl Gene ID, ENSG00000179877) as shown in SEQ ID NO: 37 and homologs thereof derived from other organism species. The COL5A2 gene can be obtained by the method disclosed in, for example, Burgeson, R. E. et al., 2002, Proceedings of the National Academic Sciences, U.S.A., vol. 73, pp. 2579-2583. The fact that variations in the COL5A2 gene expression can become an indication of metastasis of kidney cancer is not known.

[0136] The term “BRD3 gene” or “BRD3” as used herein includes a gene (or DNA) encoding the Bromodomain-Containing Protein 3 gene (or DNA) as shown in a given nucleotide sequence (i.e., SEQ ID NO: 38), a homolog thereof, a mutant thereof, a derivative thereof, or the like, unless it is defined by a SEQ ID NO. Specifically, it includes the BRD3 gene (Ensembl Gene ID, ENSG00000169925) as shown in SEQ ID NO: 38 and homologs thereof derived from other organism species. The BRD3 gene can be obtained by the method disclosed in, for example, Nomura, N. L. et al., 1994, DNA Research, vol. 1, pp. 223-229. The fact that variations in the BRD3 gene expression can become an indication of metastasis of kidney cancer is not known.

[0137] The term “ATP6V0A4 gene” or “ATP6V0A4” as used herein includes a gene (or DNA) encoding the ATPase, H+ Transporting, Lysosomal V0 Subunit A ISOFORM 4 gene (or DNA) as shown in a given nucleotide sequence (i.e., SEQ ID NO: 39), a homolog thereof, a mutant thereof, a derivative thereof, or the like, unless it is defined by a SEQ ID NO. Specifically, it includes the ATP6V0A4 gene (Ensembl Gene ID, ENSG00000105929) as shown in SEQ ID NO: 39 and homologs thereof derived from other organism species. The ATP6V0A4 gene can be obtained by the method disclosed in, for example, Smith, A. N. et al., 2000, Nature Genetics, vol. 26, pp. 71-75. The fact that variations in the ATP6V0A4 gene expression can become an indication of metastasis of kidney cancer is not known.

[0138] The term “PRODH2 gene” or “PRODH2” as used herein includes a gene (or DNA) encoding the Nephrin gene (or DNA) as shown in a given nucleotide sequence (i.e., SEQ ID NO: 40), a homolog thereof, a mutant thereof, a derivative thereof, or the like, unless it is defined by a SEQ ID NO. Specifically, it includes the PRODH2 gene (Ensembl Gene ID, ENSG00000161270) as shown in SEQ ID NO: 40 and homologs thereof derived from other organism species. The PRODH2 gene can be obtained by the method disclosed in, for example, Chakravarti, A. et al., 2002, Proceedings of the National Academic Sciences, U.S.A., vol. 99, pp. 4755-4756. The fact that variations in the PRODH2 gene expression can become an indication of metastasis of kidney cancer is not known.

[0139] The term “EPHB2 gene” or “EPHB2” as used herein includes a gene (or DNA) encoding the Ephrin Type-B Receptor 2 gene (or DNA) as shown in a given nucleotide sequence (i.e., SEQ ID NO: 41), a homolog thereof, a mutant thereof, a derivative thereof, or the like, unless it is defined by a SEQ ID NO. Specifically, it includes the EPHB2 gene (Ensembl Gene ID, ENSG00000133216) as shown in SEQ ID NO: 41 and homologs thereof derived from other organism species. The EPHB2 gene can be obtained by the method disclosed in, for example, Chan, J. et al., 1991, Oncogene, vol. 6, pp. 1057-1061. The fact that variations in the EPHB2 gene expression can become an indication of metastasis of kidney cancer is not known.

[0140] The term “LYAR gene” or “LYAR” as used herein includes a gene (or DNA) encoding the Hypothetical Protein FLJ20425 gene (or DNA) as shown in a given nucleotide sequence (i.e., SEQ ID NO: 42), a homolog thereof, a mutant thereof, a derivative thereof, or the like, unless it is defined by a SEQ ID NO. Specifically, it includes the LYAR gene (Ensembl Gene ID, ENSG00000145220) as shown in SEQ ID NO: 42 and homologs thereof derived from other organism species. The LYAR gene can be obtained by the method disclosed in, for example, Su, L. et al., 1993, Genes Development, vol. 7, pp. 735-748. The fact that variations in the LYAR gene expression can become an indication of metastasis of kidney cancer is not known.

[0141] The term “COX6B gene” or “COX6B” as used herein includes a gene (or DNA) encoding the Cytochrome C Oxidase Polypeptide VIB gene (or DNA) as shown in a given nucleotide sequence (i.e., SEQ ID NO: 43), a homolog thereof, a mutant thereof, a derivative thereof, or the like, unless it is defined by a SEQ ID NO. Specifically, it includes the COX6B gene (Ensembl Gene ID, ENSG00000126267) as shown in SEQ ID NO: 43 and homologs thereof derived from other organism species. The COX6B gene can be obtained by the method disclosed in, for example, Taanman, J-W. et al., 1989, Nucleic Acids Research, vol. 17, pp. 1766. The fact that variations in the COX6B gene expression can become an indication of metastasis of kidney cancer is not known.

[0142] The term “PRH1 gene” or “PRH1” as used herein includes a gene (or DNA) encoding the Salivary Acidic Proline-Rich Phosphoprotein ½ gene (or DNA) as shown in a given nucleotide sequence (i.e., SEQ ID NO: 44), a homolog thereof, a mutant thereof, a derivative thereof, or the like, unless it is defined by a SEQ ID NO. Specifically, it includes the PRH1 gene (Ensembl Gene ID, ENSG00000176621) as shown in SEQ ID NO: 44 and homologs thereof derived from other organism species. The PRH1 gene can be obtained by the method disclosed in, for example, Oppenheim, F. G. et al., 1971, Biochemistry, vol. 10, pp. 4233-4238. The fact that variations in the PRH1 gene expression can become an indication of metastasis of kidney cancer is not known.

[0143] The term “LAPTM5 gene” or “LAPTM5” as used herein includes a gene (or DNA) encoding the Lysosomal-Associated Multitransmembrane Protein gene (or DNA) as shown in a given nucleotide sequence (i.e., SEQ ID NO: 45), a homolog thereof, a mutant thereof, a derivative thereof, or the like, unless it is defined by a SEQ ID NO. Specifically, it includes the LAPTM5 gene (Ensembl Gene ID, ENSG00000162511) as shown in SEQ ID NO: 45 and homologs thereof derived from other organism species. The LAPTM5 gene can be obtained by the method disclosed in, for example, Adra, C. N. et al., 1996, Genomics, vol. 35, pp. 328-337. The fact that variations in the LAPTM5 gene expression can become an indication of metastasis of kidney cancer is not known; however, the possibility that LAPTM5 may become a marker for kidney cancer is presumed in WO 2005-24603.

[0144] The term “RPS6KA4 gene” or “RPS6KA4” as used herein includes a gene (or DNA) encoding the Ribosomal Protein S6 Kinase, 90KDA, Polypeptide 4 gene (or DNA) as shown in a given nucleotide sequence (i.e., SEQ ID NO: 46), a homolog thereof, a mutant thereof, a derivative thereof, or the like, unless it is defined by a SEQ ID NO. Specifically, it includes the RPS6KA4 gene (Ensembl Gene ID, ENSG00000162302) as shown in SEQ ID NO: 46 and homologs thereof derived from other organism species. The RPS6KA4 gene can be obtained by the method disclosed in, for example, Pierrat, B. et al., 1998, Journal of Biological Chemistry, vol. 273, pp. 29661-29671. The fact that variations in the RPS6KA4 gene expression can become an indication of metastasis of kidney cancer is not known.

[0145] The term “GCC2 gene” or “GCC2” as used herein includes a gene (or DNA) encoding the GRIP and Coiled-Coil Domain Containing 2 gene (or DNA) as shown in a given nucleotide sequence (i.e., SEQ ID NO: 47), a homolog thereof, a mutant thereof, a derivative thereof, or the like, unless it is defined by a SEQ ID NO. Specifically, it includes the GCC2 gene (Ensembl Gene ID, ENSG00000144055) as shown in SEQ ID NO: 47 and homologs thereof derived from other organism species. The GCC2 gene can be obtained by the method disclosed in, for example, Eichmuller, S. et al., 2001, Proceedings of the National Academic Sciences, U.S.A., vol. 98, pp. 629-634. The fact that variations in the GCC2 gene expression can become an indication of metastasis of kidney cancer is not known.

[0146] The term “FGF2 gene” or “FGF2” as used herein includes a gene (or DNA) encoding the Heparin-Binding Growth Factor 2 gene (or DNA) as shown in a given nucleotide sequence (i.e., SEQ ID NO: 48), a homolog thereof, a mutant thereof, a derivative thereof, or the like, unless it is defined by a SEQ ID NO. Specifically, it includes the FGF2 gene (Ensembl Gene ID, ENSG00000138685) as shown in SEQ ID NO: 48 and homologs thereof derived from other organism species. The FGF2 gene can be obtained by the method disclosed in, for example, Abraham, J. et al., 1986, Science, vol. 233, pp. 545-548. The fact that variations in the FGF2 gene expression can become an indication of metastasis of kidney cancer is known as disclosed in, for example, Miyake, H. et al., 1996, Cancer Research, vol. 56, pp. 2440-2445.

[0147] The term “MMP14 gene” or “MMP14” as used herein includes a gene (or DNA) encoding the Matrix Metalloproteinase-14 gene (or DNA) as shown in a given nucleotide sequence (i.e., SEQ ID NO: 49), a homolog thereof, a mutant thereof, a derivative thereof, or the like, unless it is defined by a SEQ ID NO. Specifically, it includes the MMP14 gene (Ensembl Gene ID, ENSG00000157227) as shown in SEQ ID NO: 49 and homologs thereof derived from other organism species. The MMP14 gene can be obtained by the method disclosed in, for example, Sato, H. et al., 1994, Nature, vol. 370, pp. 61-65. The fact that variations in the MMP14 gene expression can become an indication of metastasis of kidney cancer is known as disclosed in, for example, Kitagawa, Y. et al., 1999, Journal of Urology, vol. 162, pp. 905-909

[0148] The term “ERBB2 gene” or “ERBB2” as used herein includes a gene (or DNA) encoding the Receptor Protein-Tyrosine Kinase ERBB-2 gene (or DNA) as shown in a given nucleotide sequence (i.e., SEQ ID NO: 50), a homolog thereof, a mutant thereof, a derivative thereof, or the like, unless it is defined by a SEQ ID NO. Specifically, it includes the ERBB2 gene (Ensembl Gene ID, ENSG00000141736) as shown in SEQ ID NO: 50 and homologs thereof derived from other organism species. The ERBB2 gene can be obtained by the method disclosed in, for example, Yang-Feng, T. L. et al., 1985, Citogenetic Cell Genetics, vol. 40, pp. 784. The fact that variations in the ERBB2 gene expression can become an indication of metastasis of kidney cancer is known as disclosed in, for example, Freeman, M. R. et al., 1989, Cancer Research, vol. 49, pp. 6221-6225.

[0149] Other genes or polypeptides described herein are adequately described in the following description.

### EFFECTS OF THE INVENTION

[0150] The present invention provides a composition for diagnosing a disease, which is useful for diagnosing, detecting, identifying, or predicting the presence or metastasis of kidney cancer and for treating kidney cancer, and a method for diagnosing, detecting, identifying, or predicting the presence or metastasis of kidney cancer using said composition. Thus, the present invention provides remarkable effects by providing a rapid and simple method for detecting, identifying, or predicting the presence or metastasis of kidney cancer with high specificity and high efficiency of prediction.

[0151] Some of the markers for kidney cancer of the present invention are found in biological samples, such as blood taken from patients with kidney cancer. Since the above-mentioned markers are not or almost not found in healthy persons, the presence or amount of the markers can be used as the indication to easily detect kidney cancer in the blood, for example.

[0152] The present invention enables effective diagnosis for managing the prognosis for patients with kidney cancer by using the probes for detecting kidney cancer of the present invention in combination with the probes for detecting metastasis of kidney cancer of the present invention.

### BRIEF DESCRIPTION OF THE DRAWINGS

[0153] FIG. 1 shows the survival curves prepared by the Kaplan-Meier method concerning a group of patients in which metastasis to organs other than the kidney was not diagnosed at the time of surgery (M=0) and concerning a group of patients in which metastasis was diagnosed (M=1). The vertical axis indicates a survival rate, and the horizontal axis indicates years after surgery. The 5-year survival was 96% (M=0) and 13% (M=1), respectively.

[0154] FIG. 2 shows the probability of predicting patients with good prognoses when the polynucleotides shown in SEQ ID NOS: 1 to 19 and 48 corresponding to the genes indicated in Table 1 are used in combination as a DNA chip, and the probability of predicting patients with poor prognoses when the polynucleotides shown in SEQ ID NOS: 20 to 47, 49, and 50 corresponding to the genes are used in combination as a DNA chip. The vertical axis indicates the probability of predicting patients with good prognoses or poor prognoses, and the horizontal axis indicates the total number of genes required for predicting patients with good prognoses or poor prognoses. The solid line indicates the probability of predicting patients with good prognoses, and the broken line indicates the probability of predicting patients with poor prognoses.

### PREFERRED EMBODIMENTS OF THE INVENTION

[0155] Hereafter, the present invention is described in more detail.

### 1. Kidney Cancer-Associated Markers

### 1.1 Kidney Cancer-Associated Target Nucleic Acids

[0156] Examples of target nucleic acids as markers associated with metastasis of kidney cancer for detecting, identifying, or predicting the presence or metastasis of kidney cancer, for predicting the prognosis for a kidney cancer patient, or for identifying the presence or absence of cells to which kidney cancer has metastasized using the composition, kit, or DNA chip of the present invention include human genes each comprising a nucleotide sequence as shown in any of SEQ ID NOS: 1 to 50 (i.e., PABPN1, PINK1, TFF2, EIF3S9, MAX, MLL4, CACNB2, ZMYND11, BAT2, NRBP, MCM3AP, COL4A1, MKNK1, BBC3, F1110359, DPT, C10orf76, DIA1, PBK, PRKD2, KRT19, FLJ23436, NPHS2, C3orf14, AGTR2, HTR1F, KIF3B, DCN, STK22C, DKFZp566C0424, CNR1, HOMER3, GPR2, FLJ12442, XLKD1, CASKIN2, COL5A2, BRD3, ATP6V0A4, PRODH2, EPHB2, LYAR, COX6B, PRH1, LAPTM5, RPS6KA4, GCC2, FGF2, MMP14, and ERBB2, respectively), homologs thereof, transcription products or cDNAs thereof, mutants thereof, and derivatives thereof. The terms “gene,” “homolog,” “transcription product,” “cDNA,” “mutant,” and “derivative” are as defined above. The preferred target nucleic acids are human genes, each of which comprises a nucleotide sequence as shown in any of SEQ ID NOS: 1 to 50, and transcription products or cDNAs thereof, preferably transcription products or cDNAs.

[0157] According to the present invention, the expression levels of said genes, a target of the prediction of the prognosis for kidney cancer patients and/or a target of the prediction of the metastasis of kidney cancer, significantly change (i.e., increase or decrease) in the kidney cancer tissues from the patients with poor prognoses, when compared with the kidney cancer tissues from patients with good prognoses. Table 1 shows the Ensemble Gene ID numbers and the GenBank accession numbers of the genes collectively. Genes shown in Table 1 are the genes that recognize kidney cancer tissue from a patient with good prognosis and the genes that recognize kidney cancer tissue from a patient with poor prognosis.

TABLE 1

| SEQ | | | |
|---|---|---|---|
| ID | Ensemble | GenBank | |
| NO: | Gene ID | Acc. No. | Genes |
| 1 | ENSG00000100836 | NM_004643 | PABPN1 |
| 2 | ENSG00000180056 | NM_032409 | PINK1 |
| 3 | ENSG00000160181 | NM_005423 | TFF2 |
| 4 | ENSG00000106263 | NM_003751 | EIF3S9 |
| 5 | ENSG00000125952 | NM_002382 | MAX |
| 6 | ENSG00000105663 | NM_014727 | MLL4 |
| 7 | ENSG00000165995 | NM_000724 | CACNB2 |
| 8 | ENSG00000015171 | NM_006624 | ZMYND11 |
| 9 | ENSG00000111960 | NM_004638 | BAT2 |
| 10 | ENSG00000115216 | NM_013392 | NRBP |
| 11 | ENSG00000160294 | NM_003906 | MCM3AP |
| 12 | ENSG00000139825 | NM_001845 | COL4A1 |
| 13 | ENSG00000079277 | NM_003684 | MKNK1 |
| 14 | ENSG00000105327 | NM_014417 | BBC3 |
| 15 | ENSG00000119285 | NM_018072 | FLJ10359 |
| 16 | ENSG00000143196 | NM_001937 | DPT |
| 17 | ENSG00000120029 | NM_024541 | C10orf76 |
| 18 | ENSG00000100243 | NM_007326 | DIA1 |
| 19 | ENSG00000168078 | NM_018492 | PBK |
| 20 | ENSG00000105287 | NM_016457 | PRKD2 |
| 21 | ENSG00000171345 | NM_002276 | KRT19 |
| 22 | ENSG00000169957 | NM_024671 | FLJ23436 |
| 23 | ENSG00000116218 | NM_014625 | NPHS2 |
| 24 | ENSG00000114405 | NM_020685 | C3orf14 |
| 25 | ENSG00000180772 | NM_000686 | AGTR2 |
| 26 | ENSG00000179097 | NM_000866 | HTR1F |
| 27 | ENSG00000101350 | NM_004798 | KIF3B |
| 28 | ENSG00000011465 | NM_133506 | DCN |
| 29 | ENSG00000162526 | NM_052841 | STK22C |
| 30 | ENSG00000055070 | BX640985 | DKFZp566C0424 |
| 31 | ENSG00000118432 | NM_016083 | CNR1 |
| 32 | ENSG00000051128 | NM_004838 | HOMER3 |
| 33 | ENSG00000177032 | NM_016602 | GPR2 |
| 34 | ENSG00000168268 | NM_022908 | FLJ12442 |
| 35 | ENSG00000133800 | NM_006691 | XLKD1 |
| 36 | ENSG00000177303 | NM_020753 | CASKIN2 |
| 37 | ENSG00000179877 | NM_000393 | COL5A2 |
| 38 | ENSG00000169925 | NM_007371 | BRD3 |
| 39 | ENSG00000105929 | NM_020632 | ATP6V0A4 |
| 40 | ENSG00000161270 | NM_021232 | PRODH2 |
| 41 | ENSG00000133216 | NM_004442 | EPHB2 |
| 42 | ENSG00000145220 | NM_017816 | LYAR |
| 43 | ENSG00000126267 | NM_001863 | COX6B |
| 44 | ENSG00000176621 | NM_006250 | PRH2 |
| 45 | ENSG00000162511 | NM_006762 | LAPTM5 |
| 46 | ENSG00000162302 | NM_003942 | RPS6KA4 |
| 47 | ENSG00000144055 | NM_181453, | GCC2 |
| | | NM_014635 | |
| 48 | ENSG00000138685 | NM_002006 | FGF2 |
| 49 | ENSG00000157227 | NM_004995 | MMP14 |
| 50 | ENSG00000141736 | NM_004448 | ERBB2 |

[0158] The 1st target nucleic acids are the PABPN1 gene, homologs thereof, transcription products or cDNAs thereof, mutants thereof, or derivatives thereof.

[0159] The 2nd target nucleic acids are the PINK1 gene, homologs thereof, transcription products or cDNAs thereof, mutants thereof, or derivatives thereof.

[0160] The 3rd target nucleic acids are the TFF2 gene, homologs thereof, transcription products or cDNAs thereof, mutants thereof, or derivatives thereof.

[0161] The 4th target nucleic acids are the EIF3S9 gene, homologs thereof, transcription products or cDNAs thereof, mutants thereof, or derivatives thereof.

[0162] The 5th target nucleic acids are the MAX gene, homologs thereof, transcription products or cDNAs thereof, mutants thereof, or derivatives thereof.

[0163] The 6th target nucleic acids are the MLL4 gene, homologs thereof, transcription products or cDNAs thereof, mutants thereof, or derivatives thereof.

[0164] The 7th target nucleic acids are the CACNB2 gene, homologs thereof, transcription products or cDNAs thereof, mutants thereof, or derivatives thereof.

[0165] The 8th target nucleic acids are the ZMYND11 gene, homologs thereof, transcription products or cDNAs thereof, mutants thereof, or derivatives thereof.

[0166] The 9th target nucleic acids are the BAT2 gene, homologs thereof, transcription products or cDNAs thereof, mutants thereof, or derivatives thereof.

[0167] The 10th target nucleic acids are the NRBP gene, homologs thereof, transcription products or cDNAs thereof, mutants thereof, or derivatives thereof.

[0168] The 11th target nucleic acids are the MCM3AP gene, homologs thereof, transcription products or cDNAs thereof, mutants thereof, or derivatives thereof.

[0169] The 12th target nucleic acids are the COL4A1 gene, homologs thereof, transcription products or cDNAs thereof, mutants thereof, or derivatives thereof.

[0170] The 13th target nucleic acids are the MKNK1 gene, homologs thereof, transcription products or cDNAs thereof, mutants thereof, or derivatives thereof.

[0171] The 14th target nucleic acids are the BBC3 gene, homologs thereof, transcription products or cDNAs thereof, mutants thereof, or derivatives thereof.

[0172] The 15th target nucleic acids are the FLJ10359 gene, homologs thereof, transcription products or cDNAs thereof, mutants thereof, or derivatives thereof.

[0173] The 16th target nucleic acids are the DPT gene, homologs thereof, transcription products or cDNAs thereof, mutants thereof, or derivatives thereof.

[0174] The 17th target nucleic acids are the C10orf76 gene, homologs thereof, transcription products or cDNAs thereof, mutants thereof, or derivatives thereof.

[0175] The 18th target nucleic acids are the DIA1 gene, homologs thereof, transcription products or cDNAs thereof, mutants thereof, or derivatives thereof.

[0176] The 19th target nucleic acids are the PBK gene, homologs thereof, transcription products or cDNAs thereof, mutants thereof, or derivatives thereof.

[0177] The 20th target nucleic acids are the PRKD2 gene, homologs thereof, transcription products or cDNAs thereof, mutants thereof, or derivatives thereof.

[0178] The 21st target nucleic acids are the KRT19 gene, homologs thereof, transcription products or cDNAs thereof, mutants thereof, or derivatives thereof.

[0179] The 22nd target nucleic acids are the FLJ23436 gene, homologs thereof, transcription products or cDNAs thereof, mutants thereof, or derivatives thereof.

[0180] The 23rd target nucleic acids are the NPHS2 gene, homologs thereof, transcription products or cDNAs thereof, mutants thereof, or derivatives thereof.

[0181] The 24th target nucleic acids are the C3orf14 gene, homologs thereof, transcription products or cDNAs thereof, mutants thereof, or derivatives thereof.

[0182] The 25th target nucleic acids are the AGTR2 gene, homologs thereof, transcription products or cDNAs thereof, mutants thereof, or derivatives thereof.

[0183] The 26th target nucleic acids are the HTR1F gene, homologs thereof, transcription products or cDNAs thereof, mutants thereof, or derivatives thereof.

[0184] The 27th target nucleic acids are the KIF3B gene, homologs thereof, transcription products or cDNAs thereof, mutants thereof, or derivatives thereof.

[0185] The 28th target nucleic acids are the DCN gene, homologs thereof, transcription products or cDNAs thereof, mutants thereof, or derivatives thereof.

[0186] The 29th target nucleic acids are the STK22C gene, homologs thereof, transcription products or cDNAs thereof, mutants thereof, or derivatives thereof.

[0187] The 30th target nucleic acids are the DKFZp566C0424 gene, homologs thereof, transcription products or cDNAs thereof, mutants thereof, or derivatives thereof.

[0188] The 31st target nucleic acids are the CNR1 gene, homologs thereof, transcription products or cDNAs thereof, mutants thereof, or derivatives thereof.

[0189] The 32nd target nucleic acids are the HOMER3 gene, homologs thereof, transcription products or cDNAs thereof, mutants thereof, or derivatives thereof.

[0190] The 33rd target nucleic acids are the GPR2 gene, homologs thereof, transcription products or cDNAs thereof, mutants thereof, or derivatives thereof.

[0191] The 34th target nucleic acids are the FLJ12442 gene, homologs thereof, transcription products or cDNAs thereof, mutants thereof, or derivatives thereof.

[0192] The 35th target nucleic acids are the XLKD1 gene, homologs thereof, transcription products or cDNAs thereof, mutants thereof, or derivatives thereof.

[0193] The 36th target nucleic acids are the CASKIN2 gene, homologs thereof, transcription products or cDNAs thereof, mutants thereof, or derivatives thereof.

[0194] The 37th target nucleic acids are the COL5A2 gene, homologs thereof, transcription products or cDNAs thereof, mutants thereof, or derivatives thereof.

[0195] The 38th target nucleic acids are the BRD3 gene, homologs thereof, transcription products or cDNAs thereof, mutants thereof, or derivatives thereof.

[0196] The 39th target nucleic acids are the ATP6V0A4 gene, homologs thereof, transcription products or cDNAs thereof, mutants thereof, or derivatives thereof.

[0197] The 40th target nucleic acids are the PRODH2 gene, homologs thereof, transcription products or cDNAs thereof, mutants thereof, or derivatives thereof.

[0198] The 41st target nucleic acids are the EPHB2 gene, homologs thereof, transcription products or cDNAs thereof, mutants thereof, or derivatives thereof.

[0199] The 42nd target nucleic acids are the LYAR gene, homologs thereof, transcription products or cDNAs thereof, mutants thereof, or derivatives thereof.

[0200] The 43rd target nucleic acids are the COX6B gene, homologs thereof, transcription products or cDNAs thereof, mutants thereof, or derivatives thereof.

[0201] The 44th target nucleic acids are the PRH1 gene, homologs thereof, transcription products or cDNAs thereof, mutants thereof, or derivatives thereof.

[0202] The 45th target nucleic acids are the LAPTM5 gene, homologs thereof, transcription products or cDNAs thereof, mutants thereof, or derivatives thereof.

[0203] The 46th target nucleic acids are the RPS6KA4 gene, homologs thereof, transcription products or cDNAs thereof, mutants thereof, or derivatives thereof.

[0204] The 47th target nucleic acids are the GCC2 gene, homologs thereof, transcription products or cDNAs thereof, mutants thereof, or derivatives thereof.

[0205] The 48th target nucleic acids are the FGF2 gene, homologs thereof, transcription products or cDNAs thereof, mutants thereof, or derivatives thereof.

[0206] The 49th target nucleic acids are the MMP14 gene, homologs thereof, transcription products or cDNAs thereof, mutants thereof, or derivatives thereof.

[0207] The 50th target nucleic acids are the ERBB2 gene, homologs thereof, transcription products or cDNAs thereof, mutants thereof, or derivatives thereof

### 1.2 Kidney Cancer-Associated Target Polypeptide (1)

[0208] Examples of target polypeptides as markers associated with the kidney cancer for detecting, identifying, or predicting the presence or metastasis of kidney cancer, for predicting the prognosis for a kidney cancer patient, or for identifying the presence or absence of cells to which kidney cancer has metastasized using the composition or kit of the present invention include polypeptides encoded by PABPN1, PINK1, TFF2, EIF3S9, MAX, MLL4, CACNB2, ZMYND11, BAT2, NRBP, MCM3AP, COL4A1, MKNK1, BBC3, FLJ10359, DPT, C10orf76, DIA1, PBK, PRKD2, KRT19, FLJ23436, NPHS2, C3orf14, AGTR2, HTR1F, KIF3B, DCN, STK22C, DKFZp566C0424, CNR1, HOMER3, GPR2, FLJ12442, XLKD1, CASKIN2, COL5A2, BRD3, ATP6V0A4, PRODH2, EPHB2, LYAR, COX6B, PRH1, LAPTM5, RPS6KA4, GCC2, FGF2, MMP14, and ERBB2 genes, such as human polypeptides each comprising an amino acid sequence as shown in SEQ ID NOS: 101 to 150, homologs thereof, mutants thereof, or derivatives thereof. The terms “polypeptide,” “homolog,” “mutant,” and “derivative” are as defined above. Examples of preferable target polypeptides are human polypeptides each comprising an amino acid sequence as shown in SEQ ID NOS: 101 to 110, 112 to 120, and 122 to 147.

[0209] According to the present invention, the expression levels of the polypeptides, which are a target of the prediction of the prognosis for kidney cancer patients and/or a target of the prediction of the metastasis of kidney cancer, significantly change (i.e., increase or decrease) in the kidney cancer tissues from the patients with poor prognoses, when compared with the kidney cancer tissues from patients with good prognoses, as with the expression levels of the corresponding genes and the transcription products thereof. Alternatively, the levels of such polypeptides in the blood significantly change (i.e., increase or decrease) in the kidney cancer patients with poor prognoses, when compared with the kidney cancer patients with good prognoses.

### 1.3 Kidney Cancer-Associated Target Polypeptide (2)

[0210] Other kidney cancer-associated target polypeptides as markers for detecting kidney cancer in vitro using the composition or kit of the present invention are polypeptides comprising the amino acid sequences as shown in SEQ ID NOS: 151 to 197, preferably SEQ ID NOS: 151, 153, 155 to 160, or SEQ ID NOS: 161 to 190, mutants thereof, or fragments thereof.

[0211] Polypeptides as shown in SEQ ID NOS: 151 to 160 and 191 and in SEQ ID NOS: 161 to 190, and 192 to 197 of the present invention are shown in Tables 2 and 3 with the gene names, protein numbers (GenBank names and accession numbers), and properties. The listed polypeptides are detected specifically in, for example, blood plasma of patients with kidney cancer, whereas they are not detected or are much lower than the detectable level in blood plasmas of healthy persons.

TABLE 2

| SEQ ID | | | |
|---|---|---|---|
| NO: | Gene name | Protein No. | Properties |
| 151 | AAK2 | P54646 | AMP kinase 2 |
| 152 | SLK4 | Q8IW52 | SLIT and NTRK-like protein 4 precursor |
| 153 | SP4L | Q8TC36 | Sperm-associated antigen 4-like protein (spermary and |
| | | | spermatogenesis-associated gene 4 protein) |
| 154 | C5P1 | Q96SZ6 | CDK5 regulatory subunit-associated protein 1 (CDK5 |
| | | | activator-binding protein C42) (CGI-05) |
| 155 | SI8A | Q92185 | α-N-acetyl-neuraminide α-2,8-sialyltransferase (EC |
| | | | 2.4.99.8) (ganglioside GD3 synthase) |
| 156 | KAP2 | P13861 | cAMP-dependent protein kinase type II-α regulatory |
| | | | chain |
| 157 | F262 | O60825 | 6-Phosphofructo-2-kinase/fructose-2,6-biphosphatase |
| | | | 2 (6PF-2-K/Fru-2,6-P2ASE heart isozyme) |
| | | | (PFK-2/FBPase-2)[6-phosphofructo-2-kinase (EC |
| | | | 2.7.1.105); containing fructose-2,6-biphosphatase (EC |
| | | | 3.1.3.46)] |
| 158 | TCPH | Q99832 | T-complex protein 1, eta subunit (TCP-1-eta) |
| | | | (CCT-eta) (HIV-1 Nef interacting protein) |
| 159 | GB11 | P29992 | Interacting protein-binding protein G(y), α subunit |
| | | | (α-11) |
| 160 | CT67 | Q9H4Z3 | Protein C20orf67 |
| 191 | CEGT | Q16739 | Ceramide glucosyltransferase (EC 2.4.1.80) |
| | | | (glucosyltransferase) (GCS) (UDP-glucose) |

TABLE 3

| SEQ ID | | | |
|---|---|---|---|
| NO: | Gene name | Protein No. | Properties |
| 161 | AMHR2 | Q16671 | Anti-muellerian hormone type II receptor precursor (EC |
| | | | 2.7.1.37) (AMH type II receptor) (MIS type II receptor) |
| | | | (MISRII) (MRII) |
| 162 | APOL3 | O95236 | Apolipoprotein L3 (apolipoprotein L-III) (ApoL-III) |
| | | | (TNF-inducible protein CG12-1) |
| 163 | DEDD2 | Q8WXF8 | DNA-binding death effector domain-containing protein 2 |
| | | | (DED-containing protein FLAME-3) |
| 164 | HEXB | P07686 | β-Hexosaminidase β chain precursor (EC 3.2.1.52) |
| | | | (N-acetyl-β-glucosaminidase) |
| 165 | HNRPK | P61978 | Heterogeneous nuclear ribonucleoprotein K (hnRNP K) |
| 166 | KPNA1 | P52294 | Importin α-1 subunit (karyopherin α-1 subunit) (SRP1-β) (RAG |
| | | | protein 2) (nucleoprotein interactor 1) (NPI-1) |
| 167 | LASP1 | Q14847 | LIM and SH3 domain protein (LASP-1) (MLN 50) |
| 168 | LIAS | O43766 | Lipoic acid synthetase, mitochondrial precursor (Lip-syn) |
| | | | (lipoic acid synthetase) (HUSSY-01) |
| 169 | MAGEC3 | Q8TD91 | Melanoma-associated antigen C3 (MAGE-C3 antigen) |
| 170 | NFATC4 | Q14934 | Nuclear factor of activated T cells, cytoplam 4 (T cell |
| | | | transcription factor NFAT3) (NF-ATc4) (NF-AT3) |
| 171 | OLFM3 | Q96PB7 | Noelin 3 precursor (olfactomedin 3) (optimedin) |
| | | | (UNQ1924/PRO4399) |
| 172 | POLR3F | Q9H1D9 | DNA-dependent RNA polymerase III 39 kDa polypeptide (EC 2.7.7.6) |
| 173 | PPP3CB | NP_066955 | Serine/threonine protein phosphatase 2B catalyst subunit, β |
| | | | isoform (EC 3.1.3.16) |
| 174 | SF1 | Q15637 | Splicing factor 1 (zinc finger protein 162) (transcription factor |
| | | | ZFM1) |
| 175 | SLC24A2 | Q9UI40 | Sodium/potassium/calcium exchanger 2 precursor |
| | | | (Na(+)/K(+)/Ca(2+)-exchange protein 2) |
| 176 | SLC26A4 | O43511 | Pendrin (sodium-independent chlorine/iodine transporter) |
| 177 | SLCO1A2 | P46721 | Solute carrier organic anion transporter family member 1A2 |
| 178 | TPM2 | P07951 | Tropomyosin β chain (tropomyosin 2) (β-tropomyosin) |
| 179 | UCHL5 | Q9Y5K5 | Ubiquitin carboxyl terminal hydrolase isozyme L5 (EC |
| | | | 3.4.19.12) (UCH-L5) |
| 180 | UGT8 | Q16880 | 2-Hydroxyacyl sphingosine 1-β-galactosyl transferase precursor |
| | | | (EC 2.4.1.45) (UDP- galactosylceramide transferase) |
| 181 | ZNF140 | P52738 | Zinc finger protein 140 |
| 182 | ZNF274 | Q96GC6 | Zinc finger protein 274 (zinc finger protein SP2114) (zinc |
| | | | finger protein HFB101) |
| 183 | MID2 | Q9UJV3 | Midline 2 |
| 184 | LIPE | Q05469 | Lipase, hormone-sensitive |
| 185 | HDAC6 | Q9UBN7 | Histone deacetylase 6 |
| 186 | ACO2 | Q99798 | Aconitase 2, mitochondria |
| 187 | APLP1 | P51693 | Amyloid β (A4) precursor-like protein 1 |
| 188 | NUMB | P49757 | Numb homolog (Drosophila) |
| 189 | ARHGEF7 | Q14155 | Rho guanine nucleotide exchange factor (GEF)7 |
| 190 | GNAQ | P50148 | Guanine nucleotide-binding protein (G protein), q polypeptide |
| 191 | MMP2 | P08253 | 72 kDa type IV collagenase precursor (EC 3.4.24.24) (72 kDa |
| | | | gelatinase) |
| 192 | TNFRSF7 | P26842 | Tumor necrosis factor receptor superfamily member 7 precursor |
| | | | (CD27L receptor) |
| 193 | PDE8B | O95263 | High-affinity cAMP-specific and IBMX-nonsensitive 3′,5′-cyclic |
| | | | hosphodiesterase 8B |
| 194 | FLOT1 | O75955 | Flotillin 1 |
| 195 | CD5 | P06127 | T-cell surface glycoprotein CD5 [precursor] |
| 196 | ECM1 | Q16610 | Extracellular matrix protein 1 |

[0212] According to the present invention, the levels of the target polypeptides for detecting kidney cancer in a biological sample such as blood are significantly or remarkably high in a subject with kidney cancer, when compared with healthy persons.

### 2. Probes for Diagnosing Kidney Cancer

[0213] According to the present invention, the probes for detecting, identifying, or predicting the presence and/or metastasis of kidney cancer or for predicting the subject's prognosis after surgery are selected from the probes of group I and/or group II:

[0214] group I: polynucleotides consisting of:

[0215] (a) a polynucleotide consisting of a nucleotide sequence as shown in any of SEQ ID NOS: 1 to 10, 12 to 20, and 22 to 47, a mutant thereof, or a fragment comprising at least 15 continuous nucleotides thereof,

[0216] (b) a polynucleotide comprising a nucleotide sequence as shown in any of SEQ ID NOS: 1 to 10, 12 to 20, and 22 to 47,

[0217] (c) a polynucleotide consisting of a nucleotide sequence complementary to a nucleotide sequence as shown in any of SEQ ID NOS: 1 to 10, 12 to 20, and 22 to 47, a mutant thereof, or a fragment comprising at least 15 continuous nucleotides thereof,

[0218] (d) a polynucleotide comprising a nucleotide sequence complementary to a nucleotide sequence as shown in any of SEQ ID NOS: 1 to 10, 12 to 20, and 22 to 47, and

[0219] (e) a polynucleotide hybridizing under stringent conditions to any of the polynucleotides (a) to (d), or a fragment comprising at least 15 continuous nucleotides thereof; and

[0220] group II: antibodies, fragments thereof or chemically modified derivatives thereof consisting of:

[0221] (f) an antibody specifically binding to at least one of a polypeptide encoded by a nucleotide sequence as shown in any of SEQ ID NOS: 1 to 10, 12 to 20, and 22 to 47 or a polypeptide having an amino acid sequence as shown in any of SEQ ID NOS: 101 to 110, 112 to 120, and 122 to 147, a mutant thereof, and a fragment thereof, a fragment of the antibody, or a chemically modified derivative of the antibody or fragment,

[0222] (g) an antibody specifically binding to at least one of a polypeptide having an amino acid sequence as shown in any of SEQ ID NOS: 151, 153, and 155 to 160, a mutant thereof, and a fragment thereof, a fragment of the antibody, or a chemically modified derivative of the antibody, and

[0223] (h) an antibody specifically binding to at least one of a polypeptide having an amino acid sequence as shown in any of SEQ ID NOS: 161 to 190, a mutant thereof, and a fragment thereof, a fragment of the antibody, or a chemically modified derivative of the antibody.

[0224] All of the above-described probes can bind to any of the kidney cancer-associated markers described in Sections 1.1 to 1.3 above, and they can be used to detect, identify or predict the presence or metastasis of kidney cancer. For example, any probe of group I and group II (f) enables detection, identification, or prediction of the presence or metastasis of kidney cancer. Also, any probe of group II (g) and (h) enables detection, identification, or prediction of the presence of kidney cancer.

[0225] According to the present invention, the nucleic acid probe includes DNA or RNA, and the antibody probe includes, for example, a polyclonal antibody, a monoclonal antibody, a fragment thereof, a synthetic antibody, a recombinant antibody, a polyspecific antibody, and a single-chain antibody.

[0226] We have now found that the probes as described in group I and/or group II could be used for detecting, identifying, or predicting the presence and/or metastasis of kidney cancer for the first time.

3. Composition for Diagnosing Kidney Cancer and/or for Predicting the Prognosis or Metastasis of Kidney Cancer

### 3.1 Nucleic Acid Composition

[0227] According to the present invention, the nucleic acid composition for detecting, identifying, or predicting the presence and metastasis of kidney cancer, for predicting the prognosis for a kidney cancer patient, and for identifying the presence or absence of to which kidney cancer has metastasized using the composition or kit of the present invention comprises one or more probes of group I as described in Section 2 above. Such composition enables qualitative and/or quantitative measurements of the presence, expression level, or amount of human derived PABPN1, PINK1, TFF2, EIF3S9, MAX, MLL4, CACNB2, ZMYND11, BAT2, NRBP, MCM3AP, COL4A1, MKNK1, BBC3, FLJ10359, DPT, C10orf76, DIA1, PBK, PRKD2, KRT19, FLJ23436, NPHS2, C3 orf14, AGTR2, HTR1F, KIF3B, DCN, STK22C, DKFZp566C0424, CNR1, HOMER3, GPR2, FLJ12442, XLKD1, CASKIN2, COL5A2, BRD3, ATP6V0A4, PRODH2, EPHB2, LYAR, COX6B, PRH1, LAPTM5, RPS6KA4, GCC2, FGF2, MMP14, and ERBB2 genes, homologs thereof, transcription products or cDNA thereof, mutants thereof, or derivatives thereof, as target nucleic acids for predicting the prognosis or metastasis of kidney cancer.

[0228] The expression levels of said target nucleic acids significantly change (i.e., increase or decrease) in the kidney cancer tissue from a patient with poor prognosis, when compared with the kidney cancer tissue from a patient with good prognosis. Accordingly, the composition of the present invention can be effectively used for measuring and comparing the expression levels of the target nucleic acids both in the kidney cancer tissue from a patient with good prognosis and in the kidney cancer tissue from a patient with poor prognosis.

[0229] The compositions usable in the present invention include a combination of one or more polynucleotides selected from: polynucleotides comprising the nucleotide sequences as shown in SEQ ID NOS: 1 to 50 as observed in the body tissue of a patient with kidney cancer, and polynucleotides complementary thereto; polynucleotides hybridizing under stringent conditions to DNA consisting of nucleotide sequences complementary to said nucleotide sequences, and polynucleotides complementary thereto; and polynucleotides comprising at least 15 continuous nucleotides in the nucleotide sequences of said polynucleotides.

[0230] Specifically, the composition of the present invention can comprise one or more polynucleotides or fragments thereof set forth below:

[0231] (1) polynucleotides each consisting of a nucleotide sequence as shown in any of SEQ ID NOS: 1 to 50, mutants thereof, or fragments comprising at least 15 continuous nucleotides thereof;

[0232] (2) polynucleotides each comprising a nucleotide sequence as shown in any of SEQ ID NOS: 1 to 50;

[0233] (3) polynucleotides each consisting of a nucleotide sequence as shown in any of SEQ ID NOS: 1 to 10, 12 to 20, and 22 to 47, mutants thereof, or fragments comprising at least 15 continuous nucleotides thereof;

[0234] (4) polynucleotides each comprising a nucleotide sequence as shown in any of SEQ ID NOS: 1 to 10, 12 to 20, and 22 to 47;

[0235] (5) polynucleotides each consisting of a nucleotide sequence complementary to a nucleotide sequence as shown in any of SEQ ID NOS: 1 to 10, 12 to 20, and 22 to 47, mutants thereof, or fragments comprising at least 15 continuous nucleotides thereof;

[0236] (6) polynucleotides each comprising a nucleotide sequence complementary to a nucleotide sequence as shown in any of SEQ ID NOS: 1 to 10, 12 to 20, and 22 to 47;

[0237] (7) polynucleotides each hybridizing under stringent conditions to DNA consisting of a nucleotide sequence complementary to a nucleotide sequence as shown in any of SEQ ID NOS: 1 to 10, 12 to 20, and 22 to 47, or fragments comprising at least 15 continuous nucleotides thereof;

[0238] (8) polynucleotides each hybridizing under stringent conditions to DNA consisting of a nucleotide sequence as shown in any of SEQ ID NOS: 1 to 10, 12 to 20, and 22 to 47 or fragments comprising at least 15 continuous nucleotides thereof;

[0239] (9) a polynucleotide consisting of the nucleotide sequence as shown in any of SEQ ID NOS: 1 to 11, 21, and 48 to 50, mutants thereof, or fragments comprising at least 15 continuous nucleotides thereof;

[0240] (10) polynucleotides comprising a nucleotide sequence as shown in any of SEQ ID NOS: 11, 21, and 48 to 50;

[0241] (11) polynucleotides consisting of a nucleotide sequence complementary to a nucleotide sequence as shown in SEQ ID NOS: 11, 21, and 48 to 50, mutants thereof, or fragments comprising at least 15 continuous nucleotides thereof;

[0242] (12) polynucleotides comprising a nucleotide sequence complementary to the nucleotide sequence as shown in any of SEQ ID NOS: 11, 21, and 48 to 50;

[0243] (13) polynucleotides each hybridizing under stringent conditions to DNA consisting of a nucleotide sequence complementary to the nucleotide sequence as shown in any of SEQ ID NOS: 11, 21, and 48 to 50 or fragments comprising at least 15 continuous nucleotides thereof; and

[0244] (14) polynucleotides each hybridizing under stringent conditions to DNA consisting of a nucleotide sequence as shown in any of SEQ ID NOS: 11, 21, and 48 to 50 or fragments comprising at least 15 continuous nucleotides thereof.

[0245] Fragments of the polynucleotide as described in (1) to (14) above can include, but are not limited to, nucleotide sequences of, for example, continuous 15 to all nucleotides, 15 to 5000 nucleotides, 15 to 4500 nucleotides, 15 to 4000 nucleotides, 15 to 3500 nucleotides, 15 to 3000 nucleotides, 15 to 2500 nucleotides, 15 to 2000 nucleotides, 15 to 1500 nucleotides, 15 to 1000 nucleotides, 15 to 900 nucleotides, 15 to 800 nucleotides, 15 to 700 nucleotides, 15 to 600 nucleotides, 15 to 500 nucleotides, 15 to 400 nucleotides, 15 to 300 nucleotides, 15 to 250 nucleotides, 15 to 200 nucleotides, 15 to 150 nucleotides, 15 to 140 nucleotides, 15 to 130 nucleotides, 15 to 120 nucleotides, 15 to 110 nucleotides, 15 to 100 nucleotides, 15 to 90 nucleotides, 15 to 80 nucleotides, 15 to 70 nucleotides, 15 to 60 nucleotides, 15 to 50 nucleotides, 15 to 40 nucleotides, 15 to 30 nucleotides or 15 to 25 nucleotides, 25 to all nucleotides, 25 to 1000 nucleotides, 25 to 900 nucleotides, 25 to 800 nucleotides, 25 to 700 nucleotides, 25 to 600 nucleotides, 25 to 500 nucleotides, 25 to 400 nucleotides, 25 to 300 nucleotides, 25 to 250 nucleotides, 25 to 200 nucleotides, 25 to 150 nucleotides, 25 to 140 nucleotides, 25 to 130 nucleotides, 25 to 120 nucleotides, 25 to 110 nucleotides, 25 to 100 nucleotides, 25 to 90 nucleotides, 25 to 80 nucleotides, 25 to 70 nucleotides, 25 to 60 nucleotides, 25 to 50 nucleotides or 25 to 40 nucleotides, 50 to all nucleotides, 50 to 1000 nucleotides, 50 to 900 nucleotides, 50 to 800 nucleotides, 50 to 700 nucleotides, 50 to 600 nucleotides, 50 to 500 nucleotides, 50 to 400 nucleotides, 50 to 300 nucleotides, 50 to 250 nucleotides, 50 to 200 nucleotides, 50 to 150 nucleotides, 50 to 140 nucleotides, 50 to 130 nucleotides, 50 to 120 nucleotides, 50 to 110 nucleotides, 50 to 100 nucleotides, 50 to 90 nucleotides, 50 to 80 nucleotides, 50 to 70 nucleotides or 50 to 60 nucleotides, 60 to all nucleotides, 60 to 1000 nucleotides, 60 to 900 nucleotides, 60 to 800 nucleotides, 60 to 700 nucleotides, 60 to 600 nucleotides, 60 to 500 nucleotides, 60 to 400 nucleotides, 60 to 300 nucleotides, 60 to 250 nucleotides, 60 to 200 nucleotides, 60 to 150 nucleotides, 60 to 140 nucleotides, 60 to 130 nucleotides, 60 to 120 nucleotides, 60 to 110 nucleotides, 60 to 100 nucleotides, 60 to 90 nucleotides, and 60 to 80 nucleotides or 60 to 70 nucleotides, and so on.

[0246] According to an embodiment of the invention, fragments of polynucleotides each comprising the nucleotide sequence as shown in any of SEQ ID NOS: 1 to 10, 12 to 20, and 22 to 47 preferably comprise a nucleotide sequence as shown in any of SEQ ID NOS: 51 to 60, 62 to 70, and 72 to 97, a complementary sequence thereof, or a partial sequence comprising at least 15 continuous nucleotides thereof.

[0247] The composition of the present invention includes the following polynucleotide or polynucleotides, for example.

[0248] (1) a polynucleotide comprising at least 15 continuous nucleotides in each of the nucleotide sequence as shown in any of SEQ ID NOS: 1 to 10, 12 to 20, and 22 to 47 or complementary sequences thereof;

[0249] (2) a polynucleotide comprising at least 60 continuous nucleotides in each of the nucleotide sequence as shown in any of SEQ ID NOS: 1 to 10, 12 to 20, and 22 to 47 or complementary sequences thereof;

[0250] (3) a polynucleotide comprising at least 15 continuous nucleotides in the nucleotide sequence as shown in any of SEQ ID NOS: 11, 21, and 48 to 50 or a complementary sequence thereof;

[0251] (4) a polynucleotide comprising at least 60 continuous nucleotides in the nucleotide sequence as shown in any of SEQ ID NOS: 11, 21, and 48 to 50 or a complementary sequence thereof;

[0252] (5) a polynucleotide comprising a nucleotide sequence as shown in any of SEQ ID NOS: 51 to 60, 62 to 70, and 72 to 97 in the nucleotide sequence as shown in SEQ ID NOS: 1 to 10, 12 to 20, and 22 to 47, and comprising at least 60 continuous nucleotides;

[0253] (6) a polynucleotide comprising a sequence complementary to a nucleotide sequence as shown in any of SEQ ID NOS: 51 to 60, 62 to 70, and 72 to 97 in the sequences complementary to the nucleotide sequence as shown in any of SEQ ID NOS: 1 to 10, 12 to 20, and 22 to 47, and comprising at least 60 continuous nucleotides;

[0254] (7) a polynucleotide comprising the nucleotide sequence as shown in any of SEQ ID NOS: 61, 71, and 98 to 100 in the nucleotide sequence as shown in any of SEQ ID NOS: 11, 21, and 48 to 50, and comprising at least 60 continuous nucleotides; and

[0255] (8) a polynucleotide comprising a sequence complementary to the nucleotide sequence as shown in any of SEQ ID NOS: 61, 71, and 98 to 100 in the sequence complementary to the nucleotide sequence as shown in any of SEQ ID NOS: 11, 21, and 48 to 50, and comprising at least 60 continuous nucleotides.

[0256] The polynucleotides or fragments thereof as used in the invention may be DNA or RNA.

[0257] Polynucleotides in the compositions of the present invention can be prepared by common techniques such as recombinant DNA technology, PCR, or a method of using an automatic DNA/RNA synthesizer.

[0258] Recombinant DNA technology or PCR can include the use of the techniques as disclosed in, for example, Ausubel. et al., Current Protocols in Molecular Biology, John Willey & Sons, US (1993); or Sambrook et al., Molecular Cloning: A Laboratory Manual, Cold Spring Harbor Laboratory Press, US (1989).

[0259] The human-derived PABPN1, PINK1, TFF2, EIF3S9, MAX, MLL4, CACNB2, ZMYND11, BAT2, NRBP, MCM3AP, COL4A1, MKNK1, BBC3, FLJ10359, DPT, C10orf76, DIA1, PBK, PRKD2, KRT19, FLJ23436, NPHS2, C3orf14, AGTR2, HTR1F, KIF3B, DCN, STK22C, DKFZp566C0424, CNR1, HOMER3, GPR2, F1112442, XLKD1, CASKIN2, COL5A2, BRD3, ATP6V0A4, PRODH2, EPHB2, LYAR, COX6B, PRH1, LAPTM5, RPS6KA4, GCC2, FGF2, MMP14, and ERBB2 genes are known, and the methods for obtaining the same are also known. Thus, these genes can be cloned in order to prepare polynucleotides as the compositions of the present invention.

[0260] Polynucleotides constituting the compositions of the present invention may be chemically synthesized using an automatic DNA synthesizer. Such synthesis is generally carried out by the phosphoramidite method, which enables the automatic synthesis of a single-stranded DNA of at most about 100 nucleotides. The automatic DNA synthesizer is commercially available from, for example, Polygen, ABI, or Applied BioSystems.

[0261] Alternatively, the polynucleotides of the present invention can be prepared by cDNA cloning. Total RNA is extracted from a tissue of a living body, such as kidney tissue, in which the target gene or genes of the present invention is/are expressed, the extracted total RNA is applied to the oligo dT cellulose column to obtain poly A(+) RNA, cDNA library is prepared therefrom by RT-PCR, and the target cDNA clones can be obtained from the resulting library by a screening method such as hybridization screening, expression screening, or antibody screening. If necessary, the cDNA clones may be amplified by PCR. Probes or primers can be selected and synthesized from any sequences comprising 15 to 100 continuous nucleotides in the nucleotide sequences as shown in SEQ ID NOS: 1 to 50. The cDNA cloning technique is described in, for example, Sambrook, J. & Russel, D., Molecular Cloning, A LABORATORY MANUAL, Cold Spring Harbor Laboratory Press, Jan. 15, 2001, vol. 1: 7.42 to 7.45, vol. 2: 8.9 to 8.17.

### 3.2 Antibody Composition

[0262] The compositions of the present invention can comprise, as probe for diagnosing kidney cancer, the antibodies described in group II of Section 2 above, fragments thereof, or chemically-modified derivatives thereof. Such compositions are useful for detecting, identifying, or predicting in vitro the presence and/or metastasis of kidney cancer in a subject afflicted with kidney cancer. In the present invention, prediction of metastasis can lead to prediction of good or poor prognosis for the subject after surgery.

[0263] (A) The first example of the antibody composition of the present invention is a composition comprising: one or more antibodies against polypeptides having the amino acid sequence as shown in any of SEQ ID NOS: 101 to 110, 112 to 120, and 122 to 147 of group II (f), fragments thereof, or chemically modified derivatives thereof.

[0264] The composition of the present invention can further comprise one or more antibodies against a polypeptide having the amino acid sequence as shown in any of SEQ ID NOS: 111, 121, and 148 to 150, a mutant of the polypeptide, or a fragment of the polypeptide; a fragment of the antibody; or a chemically modified derivative of the antibody. Use of such antibodies in combination can improve the accuracy for predicting the prognosis.

[0265] In order to detect polypeptides encoded by the PABPN1, PINK1, TFF2, EIF3S9, MAX, MLL4, CACNB2, ZMYND11, BAT2, NRBP, MCM3AP, COL4A1, MKNK1, BBC3, FLJ10359, DPT, C10orf76, DIA1, PBK, PRKD2, KRT19, FLJ23436, NPHS2, C3 orf14, AGTR2, HTR1F, KIF3B, DCN, STK22C, DKFZp566C0424, CNR1, HOMER3, GPR2, FLJ12442, XLKD1, CASKIN2, COL5A2, BRD3, ATP6V0A4, PRODH2, EPHB2, LYAR, COX6B, PRH1, LAPTM5, RPS6KA4, GCC2, FGF2, MMP14, and ERBB2 genes, as markers for predicting the prognosis or metastasis of kidney cancer, homologs thereof, mutants thereof, or derivatives thereof, at least 1, and preferably at least 2, antibodies against such polypeptides can be used in combination in the present invention.

[0266] (B) The second example of the antibody composition of the present invention is a composition comprising: one or more antibodies against polypeptides having the amino acid sequence as shown in any of SEQ ID NOS: 151 to 160 and 191 and SEQ ID NOS: 161 to 190, and 192 to 197 of group II (g) and (h), respectively, fragments thereof, or chemically modified derivatives thereof.

[0267] Such polypeptides are encoded by the genes shown in Tables 1, 2, and 3. The nucleotide sequences of such genes can be easily obtained based on the gene names shown in the tables by accessing the NCBI website.

[0268] The above-mentioned polypeptides can be obtained by the recombinant DNA technology. For example, the cDNA clones obtained in the above-described manner are incorporated into an expression vector, which is then transformed or transfected into prokaryotic or eukaryotic host cells, and the resulting prokaryotic or eukaryotic host cells are cultured. Thus, polypeptides of interest can be obtained from the cells or culture supernatants. Vectors and expression systems are commercially available from Novagen, Takara Shuzo, Daiichi Pure Chemicals, Qiagen, Stratagene, Promega, Roche Diagnostics, Invitrogen, Genetics Institute, or Amersham Bioscience.

[0269] Examples of host cells that can be used include prokaryotic cells such as bacteria (e.g., E. coli or Bacillus subtilis), yeast (e.g., Saccharomyces cerevisiae), insect cells (e.g., Sf cells), and mammalian cells (e.g., COS, CHO, and BHK cells).

[0270] Vectors can comprise, in addition to DNA encoding each of the aforementioned polypeptides, regulatory elements such as promoter, enhancer, polyadenylation signal, ribosome-binding site, replication origin, terminator, and selection marker. Moreover, in order to facilitate the purification of a polypeptide, a peptidic label may be added to the C- or N-terminus of the polypeptide to form a fusion polypeptide. Examples of representative peptidic labels include, but are not limited to, (histidine)₆₋₁₀ repeat, FLAG, myc peptide, and GFP polypeptide. The recombinant DNA techniques are described in Sambrook, J. & Russel, D. (supra).

[0271] When the polypeptides of the present invention are produced without the addition of a peptidic label, the polypeptides can be purified by, for example, ultrafiltration, salting-out, gel filtration, or ion-exchange chromatography. In addition thereto, affinity chromatography, HPLC, hydrophobic chromatography, isoelectric chromatography or the like may be carried out in combination. When the protein has a peptidic label, such as histidine repeat, FLAG, myc, or GFP, affinity chromatography suitable for each peptidic label can be carried out in accordance with conventional techniques. Construction of such an expression vector that facilitates isolation or purification is preferable. When the expression vector is constructed so as to express in the form of the fusion polypeptide of a polypeptide with a peptidic label, and such vector is used to prepare the polypeptide by genetic engineering techniques, isolation or purification of the polypeptide is easy.

[0272] According to the present invention, the mutants of the above polypeptides are a mutant comprising a deletion, substitution, addition, or insertion of one or more amino acids, preferably one or several amino acids, in each of the amino acid sequences as shown in SEQ ID NOS: 101 to 197 or partial sequences thereof; or alternatively a mutant having an identity of about 80% or higher, about 85% or higher, preferably about 90% or higher, more preferably about 95% or higher, about 97% or higher, about 98% or higher, or about 99% or higher with said amino acid sequence or a partial sequence thereof, as defined above. Examples of such mutants include naturally-occurring mutants, such as a homolog of a mammalian species other than human, a mutant thereof based on human polymorphism or splicing mutation, or the like.

[0273] According to the present invention, a fragment of the polypeptide or mutant thereof consists of at least 5, at least 7, at least 10, at least 15, preferably at least 20, at least 25, more preferably at least 30, at least 40, or at least 50 continuous amino acid residues in the amino acid sequence of the polypeptide, and has a single epitope or a plurality of epitomes. Such a fragment can immunospecifically bind to the antibody of the present invention or a fragment thereof. The polypeptide may be cleaved or fragmented by an enzyme that is present in the body, such as protease or peptidase, thereby being present as fragments.

[0274] The thus-obtained antibody that recognizes the polypeptide can specifically bind to the polypeptide via an antigen-binding site of the antibody. Specifically, a polypeptide having an amino acid sequence as shown in any of SEQ ID NOS: 101 to 197, a fragment thereof, a mutant thereof, or a fusion polypeptide can be used as an immunogen to produce immunoreactive antibodies.

[0275] More specifically, the polypeptide, a fragment thereof, a mutant thereof, or a fusion polypeptide comprises an antigenic determinant or epitope that elicits antibody formation, which antigen determinant or epitope may have a linear structure or a higher-order (or disconnected) structure. Such antigen determinant or epitope can be identified by any epitope analysis known in the art, such as phage display or reverse immunogenetics.

[0276] Antibodies of any aspect are elicited by the polypeptides of the present invention. If all, part, or an epitope of the polypeptide is isolated, a polyclonal or monoclonal antibody can be prepared in accordance with conventional techniques. An example of the method for preparing an antibody is described in Kennet et al. (ed.), Monoclonal Antibodies, Hybridomas: A New Dimension in Biological Analyses, Plenum Press, New York, 1980.

[0277] A polyclonal antibody can be prepared by immunizing an animal such as a bird (e.g., a chicken) or a mammalian (e.g., a rabbit, goat, horse, sheep, or mouse) with the polypeptide of the invention. The antibody of interest can be purified from the blood of an immunized animal via an appropriate combination of techniques such as ammonium sulfate fractionation, ion-exchange chromatography, and affinity chromatography.

[0278] A monoclonal antibody can be obtained by the technique comprising producing hybridoma cell lines that produce monoclonal antibodies specific for each relevant polypeptide in a mouse in accordance with conventional techniques. One method for producing such hybridoma cell lines comprises immunizing an animal with an enzyme polypeptide of the invention, removing spleen cells from the immunized animal, fusing the spleen cells with a myeloma cell line to produce hybridoma cells therefrom, and identifying a hybridoma cell line that produces a monoclonal antibody binding to the enzyme of interest. A monoclonal antibody can be recovered by a conventional technique.

[0279] The antibody of the present invention is not particularly limited, provided that such antibody can bind specifically to the target polypeptide of the present invention or a fragment thereof. The antibody usable in the invention is a monoclonal or polyclonal antibody, preferably monoclonal antibody. Examples of other antibodies include a recombinant antibody, a synthetic enzyme, a polyspecific antibody (e.g., a bispecific antibody), a single-stranded antibody, and an antibody fragment. Specific examples of such antibodies include Fab, F(ab′)₂, scFv, Fv, and dsFv. The globulin type of the antibody of the present invention is not particularly limited, as long as the antibody has the aforementioned properties. It may be any of IgG, IgM, IgA, IgE, and IgD.

### Preparation of Monoclonal Antibody

### (1) Immunization and Collection of Antibody-Producing Cell

[0280] The immunogen which is a target polypeptide is administered to a mammalian animal such as rat, mouse (e.g., the inbred mouse strain Balb/c), or rabbit. The dose of the immunogen is appropriately determined depending on, for example, the type of an animal to be immunized or the route of administration, and it is about 50 to 200 μg per animal. Immunization is primarily performed by injecting an immunogen subcutaneously or intraperitoneally. The intervals of immunization are not particularly limited. After the primary immunization, boost immunization is carried out 2 to 10 times, preferably 3 or 4 times, at the intervals of several days to several weeks, and preferably at the intervals of 1 to 4 weeks. After the primary immunization, the antibody titer of the blood serum of the immunized animal is repeatedly measured by, for example, enzyme-linked immuno sorbent assay (ELISA). When the antibody titer reached a plateau, the immunogen is injected intravenously or intraperitoneally to complete the final immunization. The antibody-producing cells are recovered 2 to 5 days, preferably 3 days, after the final immunization. Examples of antibody-producing cells include spleen cells, lymph node cells, and peripheral blood cells, preferably spleen cells or regional lymph node cells.

### (2) Cell Fusion

[0281] Hybridoma cell lines that produce monoclonal antibodies specific for target polypeptides are prepared. Such hybridomas can be produced and identified via conventional techniques. The method for producing such hybridoma cell lines comprises immunizing an animal with a protein of the invention, removing spleen cells from the immunized animal, fusing the spleen cells with a myeloma cell line, producing hybridoma cells therefrom, and identifying a hybridoma cell line that produces a monoclonal antibody binding to the enzyme of interest. Myeloma cell lines to be fused with antibody-producing cells can be commercially available established cell lines of animals such as mice. Preferably, cell lines to be used have drug selectivity; namely, they cannot survive in the HAT selection medium (containing hypoxanthine, aminopterin, and thymidine) in an unfused state, while they can survive only in a state fused with antibody-producing cells. The established cells are preferably derived from an animal of the same species with the animal to be immunized. A specific example of the myeloma cell line is the strain P3×63-Ag.8 (ATCC TIB9), which is a BALB/c mouse-derived hypoxanthine guanine phosphoribosyl-transferase (HGPRT) deficient cell line.

[0282] Subsequently, the myeloma cell lines are fused with the antibody-producing cells. Cell fusion is carried out in a serum-free medium for animal cell culture, such as DMEM or RPMI-1640 medium, by mixing the antibody-producing cells with the myeloma cell lines at about 1:1 to 20:1 in the presence of a cell fusion accelerator. As the cell fusion accelerator, polyethylene glycol having an average molecular weight of 1,500 to 4,000 daltons can be used at a concentration of about 10 to 80%, for example. Optionally, an auxiliary agent, such as dimethyl sulfoxide, can be used in combination in order to enhance the fusion efficiency. Further, the antibody-producing cells can be fused with the myeloma cell lines by using a commercially available cell fusion apparatus utilizing electric stimulus (e.g., electroporation).

### (3) Selection and Cloning of Hybridomas

[0283] The hybridomas of interest are selected from the fused cells. To this end, the cell suspension is adequately diluted in, for example, a fetal bovine serum-containing RPMI-1640 medium, the suspension is aliquoted into each well of a microtiter plate at about two million cells/well, a selection medium to each well, and culture is thereafter carried out while appropriately exchanging the selection medium with the same fresh medium. The culture temperature is 20° C. to 40° C., preferably about 37° C. When the myeloma cell is an HGPRT-deficient strain or thymidine kinase-deficient strain, a hybridoma of a cell having an ability to produce an antibody and a myeloma cell line can selectively be cultured and grown in the selection medium containing hypoxanthine, aminopterin, and thymidine (i.e., the HAT medium). As a result, cells grown about 14 days after the initiation of culture in the selection medium can be obtained as the hybridoma.

[0284] Subsequently, whether or not the culture supernatant of the grown hybridoma contains the antibody of interest is screened for. Screening of hybridomas can be carried out in accordance with conventional techniques, without particular limitation. For example, the culture supernatant in the well containing the grown hybridomas is partially sampled and then subjected to enzyme immuno assay (EIA) or ELISA or radio immuno assay (RIA). The fused cells are cloned using the limiting dilution method or the like, and monoclonal antibody-producing cells, i.e. hybridomas, are established in the end. The hybridoma of the present invention is stable during the culture in a basic medium, such as RPMI-1640 or DMEM, as described below, and the hybridoma can produce and secrete a monoclonal antibody that reacts specifically with a target polypeptide.

### (4) Recovery of Antibody

[0285] Monoclonal antibody can be recovered by conventional techniques. Specifically, a monoclonal antibody can be collected from the established hybridoma by the conventional cell culture technique, the ascites development, or the like. According to the cell culture technique, hybridoma is cultured in an animal cell culture medium, such as 10% fetal bovine serum-containing RPMI-1640 medium, MEM medium, or a serum-free medium, under common culture conditions (e.g., 37° C., 5% CO₂) for 2 to 10 days, and the antibody is obtained from the culture supernatant. In the case of the ascites development, about 10 millions of myeloma-derived hybridomas cells are administered intraperitoneally to an animal of the same species as the mammal from which the myeloma cell is derived, so as to allow the hybridoma cells to grow in a large quantity. After one to two weeks, the ascites or blood serum is collected from said animal.

[0286] When the purification of an antibody is required in the above-described method for collecting the antibody, the conventional techniques, such as salting out by ammonium sulfate, ion-exchange chromatography, affinity chromatography, and gel filtration chromatography, may be appropriately selected or combined to obtain the purified monoclonal antibody.

### Preparation of Polyclonal Antibody

[0287] When polyclonal antibodies are prepared, an animal such as rabbit is immunized in the same manner as described above, the antibody titer is measured 6 to 60 days after the final immunization by enzyme immunoassay (EIA or ELISA) or radio immunoassay (RIA), and blood is taken on the day the maximal antibody titer is measured, in order to obtain antiserum. Thereafter, the reactivity of the polyclonal antibodies in the antiserum is assayed by ELISA or the like.

### Chemically Modified Derivative

[0288] The antibody of the present invention or a fragment thereof may be a chemically modified derivative. Examples include derivatives labeled with an enzyme, fluorophore, or radioisotope, and chemically modified derivatives, such as an acetylated, acylated, alkylated, phosphorylated, sulfated, or glycosylated derivatives.

[0289] Examples of the labels for use in enzyme immunoassay include enzymes such as peroxidase (POD), alkaline phosphatase, β-galactosidase, urease, catalase, glucose oxidase, lactate dehydrogenase, amylase, and biotin-avidin complexes. Examples of the labels for use in fluorescence immunoassay include fluorescent substances or fluorophores, such as fluorescein isothiocyanate, tetramethylrhodamine isothiocyanate, substituted rhodamine isothiocyanate, dichlorotriazine isothiocyanate, Alexa, and AlexaFluoro. Examples of the labels for use in radio immunoassay include radioactive isotopes, such as tritium, iodine (¹³¹I, ¹²⁵I, and ¹²¹I), phosphorus (³²P), sulfur (³⁵S), and metals (e.g., ⁶⁸Ga, ⁶⁷Ga, ⁶⁸Ge, ⁵⁴Mn, ⁹⁹Mo, ⁹⁹Tc, and ¹³³Xe). Examples of the labels for use in luminescent immunoassay include luminescent molecules, luminescent substances, or bioluminescent substances, such as an NADH-, FMNH2-, luciferase system, luminol-hydrogen peroxide-POD system, acridinium ester system, or dioxetane compound system.

[0290] Alternatively, an avidin-biotin system or streptavidin-biotin system can also be used optionally. In such a case, biotin may be bound to the antibodies of the present invention or fragments thereof, for example. A label can be bound to an antibody by conventional techniques, such as the glutaraldehyde method, the maleimide method, the pyridyl disulfide method, or the periodic acid method in the case of enzyme immunoassay. In radioimmunoassay, the binding of label and antibody can be carried out in accordance with the conventional techniques, such as the chloramine-T method and Bolton-Hunter method.

4. Kit for Diagnosis of Kidney Cancer and/or Prediction of the Prognosis or Metastasis of Kidney Cancer

### 4.1 Nucleic Acid Kit

[0291] The present invention also provides a kit for detecting, identifying, or predicting in vitro the presence, metastasis, or prognosis of kidney cancer, comprising one or more polynucleotides of group I described in Section 2 above, mutants thereof, and/or fragments thereof.

[0292] The kit of the present invention can comprise nucleic acid probes selected from group I as shown below. Such probes may be packaged in suitable containers, alone or in combination.

[0293] The kit of the present invention can comprise at least one of a polynucleotide comprising the nucleotide sequence as shown in any of SEQ ID NOS: 1 to 10, 12 to 20, and 22 to 47, a polynucleotide comprising a complementary sequence thereof, a polynucleotide hybridizing under stringent conditions to said polynucleotide, or a fragment thereof.

[0294] The kit of the present invention can further comprise at least one of a polynucleotide comprising the nucleotide sequence as shown in any of SEQ ID NOS: 11, 21, and 48 to 50, a polynucleotide comprising a complementary sequence thereof, a polynucleotide hybridizing under stringent conditions to said polynucleotide, or a fragment thereof.

[0295] A fragment of the polynucleotide, which can be contained in the kit of the invention, is, for example, at least one DNA selected from the following groups (1) to (5):

[0296] (1) DNA comprising at least 15 continuous nucleotides in the nucleotide sequence as shown in any of SEQ ID NOS: 1 to 10, 11, 12 to 20, 21, 22 to 47, and 48 to 50 or a complementary sequence thereof;

[0297] (2) DNA comprising at least 60 continuous nucleotides in the nucleotide sequence as shown in any of SEQ ID NOS: 1 to 10, 11, 12 to 20, 21, 22 to 47, and 48 to 50 or a complementary sequence thereof;

[0298] (3) DNA comprising the nucleotide sequence as shown in any of SEQ ID NOS: 51 to 60, 61, 62 to 70, 71, 72 to 97, and 98 to 100 or a complementary sequence thereof and comprising at least 60 continuous nucleotides in the nucleotide sequence as shown in any of SEQ ID NOS: 1 to 10, 11, 12 to 20, 21, 22 to 47, and 48 to 50 or a complementary sequence thereof;

[0299] (4) DNA consisting of the nucleotide sequence as shown in any of SEQ ID NOS: 51 to 60, 61, 62 to 70, 71, 72 to 97, and 98 to 100; or

[0300] (5) DNA comprising a nucleotide sequence complementary to the nucleotide sequence as shown in any of SEQ ID NOS: 51 to 60, 61, 62 to 70, 71, 72 to 97, and 98 to 100.

[0301] According to a preferable embodiment, the polynucleotide is a polynucleotide consisting of a nucleotide sequence as shown in any of SEQ ID NOS: 1 to 10, 12 to 20, and 22 to 47, a polynucleotide consisting of a complementary sequence thereof, a polynucleotide hybridizing under stringent conditions to said polynucleotide, or a fragment comprising at least 15 continuous nucleotides thereof.

[0302] According to another preferable embodiment, the kit of the present invention can further comprise, in addition to the above polynucleotide, a polynucleotide consisting of the nucleotide sequence as shown in any of SEQ ID NOS: 11, 21, and 48 to 50, a polynucleotide consisting of a complementary sequence thereof, a polynucleotide hybridizing under stringent conditions to said polynucleotide, or a fragment comprising at least 15 continuous nucleotides thereof.

[0303] According to a preferable embodiment, the fragment can be a polynucleotide comprising at least 15, preferably at least 60 continuous nucleotides.

[0304] According to another preferable embodiment, the fragment is a polynucleotide comprising a nucleotide sequence as shown in any of SEQ ID NOS: 51 to 60, 61, 62 to 70, 71, 72 to 97, and 98 to 100 and comprising at least 60 continuous nucleotides in the nucleotide sequence as shown in any of SEQ ID NOS: 1 to 10, 11, 12 to 20, 21, 22 to 47, and 48 to 50, respectively, or a polynucleotide comprising a nucleotide sequence complementary thereto.

[0305] According to another preferable embodiment, the fragment is a polynucleotide comprising a nucleotide sequence as shown in any of SEQ ID NOS: 51 to 60, 61, 62 to 70, 71, 72 to 97, and 98 to 100.

[0306] According to another preferable embodiment, the fragment is a polynucleotide comprising a nucleotide sequence complementary to a nucleotide sequence as shown in any of SEQ ID NOS: 51 to 60, 61, 62 to 70, 71, 72 to 97, and 98 to 100.

[0307] According to another preferable embodiment, the fragment is a polynucleotide consisting of a nucleotide sequence as shown in any of SEQ ID NOS: 51 to 60, 61, 62 to 70, 71, 72 to 97, and 98 to 100.

[0308] Specific examples of the aforementioned combinations include: a polynucleotide comprising the nucleotide sequence as shown in SEQ ID NO: 1 or 2 or a complementary sequence thereof, a polynucleotide hybridizing under stringent conditions to such polynucleotide, and/or a fragment thereof; a polynucleotide comprising a nucleotide sequence as shown in any of SEQ ID NOS: 1 to 3 or a complementary sequence thereof, a polynucleotide hybridizing under stringent conditions to such polynucleotide, and/or a fragment thereof; a polynucleotide comprising a nucleotide sequence as shown in any of SEQ ID NOS: 1 to 4 or a complementary sequence thereof, a polynucleotide hybridizing under stringent conditions to such polynucleotide, and/or a fragment thereof; a polynucleotide comprising a nucleotide sequence as shown in any of SEQ ID NOS: 1 to 5 or a complementary sequence thereof, a polynucleotide hybridizing under stringent conditions to such polynucleotide, and/or a fragment thereof; a polynucleotide comprising a nucleotide sequence as shown in any of SEQ ID NOS: 1 to 6 or a complementary sequence thereof, a polynucleotide hybridizing under stringent conditions to such polynucleotide, and/or a fragment thereof; a polynucleotide comprising a nucleotide sequence as shown in any of SEQ ID NOS: 1 to 7 or a complementary sequence thereof, a polynucleotide hybridizing under stringent conditions to such polynucleotide, and/or a fragment thereof; a polynucleotide comprising a nucleotide sequence as shown in any of SEQ ID NOS: 1 to 8 or a complementary sequence thereof, a polynucleotide hybridizing under stringent conditions to such polynucleotide, and/or a fragment thereof; a polynucleotide comprising a nucleotide sequence as shown in any of SEQ ID NOS: 1 to 9 or a complementary sequence thereof, a polynucleotide hybridizing under stringent conditions to such polynucleotide, and/or a fragment thereof; a polynucleotide comprising a nucleotide sequence as shown in any of SEQ ID NOS: 1 to 10 or a complementary sequence thereof, a polynucleotide hybridizing under stringent conditions to such polynucleotide, and/or a fragment thereof; a polynucleotide comprising a nucleotide sequence as shown in any of SEQ ID NOS: 1 to 11 or a complementary sequence thereof, a polynucleotide hybridizing under stringent conditions to such polynucleotide, and/or a fragment thereof; a polynucleotide comprising a nucleotide sequence as shown in any of SEQ ID NOS: 1 to 12 or a complementary sequence thereof, a polynucleotide hybridizing under stringent conditions to such polynucleotide, and/or a fragment thereof; a polynucleotide comprising a nucleotide sequence as shown in any of SEQ ID NOS: 1 to 13 or a complementary sequence thereof, a polynucleotide hybridizing under stringent conditions to such polynucleotide, and/or a fragment thereof; a polynucleotide comprising a nucleotide sequence as shown in any of SEQ ID NOS: 1 to 14 or a complementary sequence thereof, a polynucleotide hybridizing under stringent conditions to such polynucleotide, and/or a fragment thereof; a polynucleotide comprising a nucleotide sequence as shown in any of SEQ ID NOS: 1 to 15 or a complementary sequence thereof and/or a fragment thereof; a polynucleotide comprising a nucleotide sequence as shown in any of SEQ ID NOS: 1 to 16 or a complementary sequence thereof, a polynucleotide hybridizing under stringent conditions to such polynucleotide, and/or a fragment thereof; a polynucleotide comprising a nucleotide sequence as shown in any of SEQ ID NOS: 1 to 17 or a complementary sequence thereof, and/or a fragment thereof; a polynucleotide comprising a nucleotide sequence as shown in any of SEQ ID NOS: 1 to 18 or a complementary sequence thereof, a polynucleotide hybridizing under stringent conditions to such polynucleotide, and/or a fragment thereof; a polynucleotide comprising a nucleotide sequence as shown in any of SEQ ID NOS: 1 to 19 or a complementary sequence thereof, a polynucleotide hybridizing under stringent conditions to such polynucleotide, and/or a fragment thereof; a polynucleotide comprising a nucleotide sequence as shown in any of SEQ ID NOS: 1 to 20 or a complementary sequence thereof, a polynucleotide hybridizing under stringent conditions to such polynucleotide, and/or a fragment thereof; a polynucleotide comprising a nucleotide sequence as shown in any of SEQ ID NOS: 1 to 21 or a complementary sequence thereof, a polynucleotide hybridizing under stringent conditions to such polynucleotide, and/or a fragment thereof; a polynucleotide comprising a nucleotide sequence as shown in any of SEQ ID NOS: 1 to 22 or a complementary sequence thereof, a polynucleotide hybridizing under stringent conditions to such polynucleotide, and/or a fragment thereof; a polynucleotide comprising a nucleotide sequence as shown in any of SEQ ID NOS: 1 to 23 or a complementary sequence thereof, a polynucleotide hybridizing under stringent conditions to such polynucleotide, and/or a fragment thereof; a polynucleotide comprising a nucleotide sequence as shown in any of SEQ ID NOS: 1 to 24 or a complementary sequence thereof, a polynucleotide hybridizing under stringent conditions to such polynucleotide, and/or a fragment thereof; a polynucleotide comprising a nucleotide sequence as shown in any of SEQ ID NOS: 1 to 25 or a complementary sequence thereof, a polynucleotide hybridizing under stringent conditions to such polynucleotide, and/or a fragment thereof; a polynucleotide comprising a nucleotide sequence as shown in any of SEQ ID NOS: 1 to 26 or a complementary sequence thereof, a polynucleotide hybridizing under stringent conditions to such polynucleotide, and/or a fragment thereof; a polynucleotide comprising a nucleotide sequence as shown in any of SEQ ID NOS: 1 to 27 or a complementary sequence thereof, a polynucleotide hybridizing under stringent conditions to such polynucleotide, and/or a fragment thereof; a polynucleotide comprising a nucleotide sequence as shown in any of SEQ ID NOS: 1 to 28 or a complementary sequence thereof, a polynucleotide hybridizing under stringent conditions to such polynucleotide, and/or a fragment thereof; a polynucleotide comprising a nucleotide sequence as shown in any of SEQ ID NOS: 1 to 29 or a complementary sequence thereof, a polynucleotide hybridizing under stringent conditions to such polynucleotide, and/or a fragment thereof; a polynucleotide comprising a nucleotide sequence as shown in any of SEQ ID NOS: 1 to 30 or a complementary sequence thereof, a polynucleotide hybridizing under stringent conditions to such polynucleotide, and/or a fragment thereof; a polynucleotide comprising a nucleotide sequence as shown in any of SEQ ID NOS: 1 to 31 or a complementary sequence thereof, a polynucleotide hybridizing under stringent conditions to such polynucleotide, and/or a fragment thereof, a polynucleotide comprising a nucleotide sequence as shown in any of SEQ ID NOS: 1 to 32 or a complementary sequence thereof, a polynucleotide hybridizing under stringent conditions to such polynucleotide, and/or a fragment thereof; a polynucleotide comprising a nucleotide sequence as shown in any of SEQ ID NOS: 1 to 33 or a complementary sequence thereof, a polynucleotide hybridizing under stringent conditions to such polynucleotide, and/or a fragment thereof; a polynucleotide comprising a nucleotide sequence as shown in any of SEQ ID NOS: 1 to 34 or a complementary sequence thereof, a polynucleotide hybridizing under stringent conditions to such polynucleotide, and/or a fragment thereof; a polynucleotide comprising a nucleotide sequence as shown in any of SEQ ID NOS: 1 to 35 or a complementary sequence thereof, a polynucleotide hybridizing under stringent conditions to such polynucleotide, and/or a fragment thereof; a polynucleotide comprising a nucleotide sequence as shown in any of SEQ ID NOS: 1 to 36 or a complementary sequence thereof, a polynucleotide hybridizing under stringent conditions to such polynucleotide, and/or a fragment thereof; a polynucleotide comprising a nucleotide sequence as shown in any of SEQ ID NOS: 1 to 37 or a complementary sequence thereof, a polynucleotide hybridizing under stringent conditions to such polynucleotide, and/or a fragment thereof; a polynucleotide comprising a nucleotide sequence as shown in any of SEQ ID NOS: 1 to 38 or a complementary sequence thereof, a polynucleotide hybridizing under stringent conditions to such polynucleotide, and/or a fragment thereof; a polynucleotide comprising a nucleotide sequence as shown in any of SEQ ID NOS: 1 to 39 or a complementary sequence thereof, a polynucleotide hybridizing under stringent conditions to such polynucleotide, and/or a fragment thereof; a polynucleotide comprising a nucleotide sequence as shown in any of SEQ ID NOS: 1 to 40 or a complementary sequence thereof, a polynucleotide hybridizing under stringent conditions to such polynucleotide, and/or a fragment thereof; a polynucleotide comprising a nucleotide sequence as shown in any of SEQ ID NOS: 1 to 41 or a complementary sequence thereof, a polynucleotide hybridizing under stringent conditions to such polynucleotide, and/or a fragment thereof; a polynucleotide comprising a nucleotide sequence as shown in any of SEQ ID NOS: 1 to 42 or a complementary sequence thereof, a polynucleotide hybridizing under stringent conditions to such polynucleotide, and/or a fragment thereof; a polynucleotide comprising a nucleotide sequence as shown in any of SEQ ID NOS: 1 to 43 or a complementary sequence thereof, a polynucleotide hybridizing under stringent conditions to such polynucleotide, and/or a fragment thereof; a polynucleotide comprising a nucleotide sequence as shown in any of SEQ ID NOS: 1 to 44 or a complementary sequence thereof, a polynucleotide hybridizing under stringent conditions to such polynucleotide, and/or a fragment thereof; a polynucleotide comprising a nucleotide sequence as shown in any of SEQ ID NOS: 1 to 45 or a complementary sequence thereof, a polynucleotide hybridizing under stringent conditions to such polynucleotide, and/or a fragment thereof; a polynucleotide comprising a nucleotide sequence as shown in any of SEQ ID NOS: 1 to 46 or a complementary sequence thereof, a polynucleotide hybridizing under stringent conditions to such polynucleotide, and/or a fragment thereof; a polynucleotide comprising a nucleotide sequence as shown in any of SEQ ID NOS: 1 to 47 or a complementary sequence thereof, a polynucleotide hybridizing under stringent conditions to such polynucleotide, and/or a fragment thereof; a polynucleotide comprising a nucleotide sequence as shown in any of SEQ ID NOS: 1 to 48 or a complementary sequence thereof, a polynucleotide hybridizing under stringent conditions to such polynucleotide, and/or a fragment thereof; a polynucleotide comprising a nucleotide sequence as shown in any of SEQ ID NOS: 1 to 49 or a complementary sequence thereof, a polynucleotide hybridizing under stringent conditions to such polynucleotide, and/or a fragment thereof; and a polynucleotide comprising a nucleotide sequence as shown in any of SEQ ID NOS: 1 to 50 or a complementary sequence thereof, a polynucleotide hybridizing under stringent conditions to such polynucleotide, and/or a fragment thereof.

[0309] According to a more preferable embodiment, the kit of the present invention can comprise at least two to all polynucleotides comprising the nucleotide sequence as shown in any of SEQ ID NOS: 51 to 97 and 98 to 100 or a complementary sequence thereof.

[0310] A specific example of another combination is a polynucleotide comprising (or consisting of) the nucleotide sequence as shown in any of SEQ ID NOS: 1 to 19 and 48 or a complementary sequence thereof, and/or a fragment thereof.

[0311] A further specific example of another combination is a polynucleotide comprising (or consisting of) the nucleotide sequence as shown in any of SEQ ID NOS: 20 to 47, 49, and 50 or a complementary sequence thereof, and/or a fragment thereof.

[0312] In the present invention, the size of fragments of the polynucleotides is, for example, continuous 15 to all nucleotides, 15 to 5000 nucleotides, 15 to 4500 nucleotides, 15 to 4000 nucleotides, 15 to 3500 nucleotides, 15 to 3000 nucleotides, 15 to 2500 nucleotides, 15 to 2000 nucleotides, 15 to 1500 nucleotides, 15 to 1000 nucleotides, 15 to 900 nucleotides, 15 to 800 nucleotides, 15 to 700 nucleotides, 15 to 600 nucleotides, 15 to 500 nucleotides, 15 to 400 nucleotides, 15 to 300 nucleotides, 15 to 250 nucleotides, 15 to 200 nucleotides, 15 to 150 nucleotides, 15 to 140 nucleotides, 15 to 130 nucleotides, 15 to 120 nucleotides, 15 to 110 nucleotides, 15 to 100 nucleotides, 15 to 90 nucleotides, 15 to 80 nucleotides, 15 to 70 nucleotides, 15 to 60 nucleotides, 15 to 50 nucleotides, 15 to 40 nucleotides, 15 to 30 nucleotides or 15 to 25 nucleotides; 25 to all nucleotides, 25 to 1000 nucleotides, 25 to 900 nucleotides, 25 to 800 nucleotides, 25 to 700 nucleotides, 25 to 600 nucleotides, 25 to 500 nucleotides, 25 to 400 nucleotides, 25 to 300 nucleotides, 25 to 250 nucleotides, 25 to 200 nucleotides, 25 to 150 nucleotides, 25 to 140 nucleotides, 25 to 130 nucleotides, 25 to 120 nucleotides, 25 to 110 nucleotides, 25 to 100 nucleotides, 25 to 90 nucleotides, 25 to 80 nucleotides, 25 to 70 nucleotides, 25 to 60 nucleotides, 25 to 50 nucleotides or 25 to 40 nucleotides; 50 to all nucleotides, 50 to 1000 nucleotides, 50 to 900 nucleotides, 50 to 800 nucleotides, 50 to 700 nucleotides, 50 to 600 nucleotides, 50 to 500 nucleotides, 50 to 400 nucleotides, 50 to 300 nucleotides, 50 to 250 nucleotides, 50 to 200 nucleotides, 50 to 150 nucleotides, 50 to 140 nucleotides, 50 to 130 nucleotides, 50 to 120 nucleotides, 50 to 110 nucleotides, 50 to 100 nucleotides, 50 to 90 nucleotides, 50 to 80 nucleotides, 50 to 70 nucleotides or 50 to 60 nucleotides; 60 to all nucleotides, 60 to 1000 nucleotides, 60 to 900 nucleotides, 60 to 800 nucleotides, 60 to 700 nucleotides, 60 to 600 nucleotides, 60 to 500 nucleotides, 60 to 400 nucleotides, 60 to 300 nucleotides, 60 to 250 nucleotides, 60 to 200 nucleotides, 60 to 150 nucleotides, 60 to 140 nucleotides, 60 to 130 nucleotides, 60 to 120 nucleotides, 60 to 110 nucleotides, 60 to 100 nucleotides, 60 to 90 nucleotides, or 60 to 80 nucleotides or 60 to 70, in the nucleotide sequence of each polynucleotide.

[0313] It should be noted that the above combinations that constitute the kit of the present invention are exemplary, and any other combinations fall within the scope of the present invention.

[0314] The kit of the present invention can comprise, in addition to the polynucleotides of the present invention, mutants thereof, or fragments thereof as described above, known or novel polynucleotides that enable detection of kidney cancer or prediction of metastasis or prognosis of kidney cancer.

### 4.2 Antibody Kit

[0315] The present invention also provides a kit for detecting, identifying, or predicting in vitro the presence, metastasis, or prognosis of kidney cancer, comprising one or more of the antibodies of group II described in Section 2 above, fragments thereof, chemically modified derivatives thereof, the antibodies described in Section 3.2 above, fragments thereof, or chemically modified derivatives thereof.

[0316] The kit of the present invention can comprise, as probes, antibodies from groups II (f), (g), and (h), fragments thereof, or chemically modified derivatives thereof. These probes can be packaged in suitable containers, alone or in combination.

[0317] Examples of probe combinations are as follows.

[0318] In order to detect polypeptides encoded by the PABPN1, PINK1, TFF2, EIF3S9, MAX, MLL4, CACNB2, ZMYND11, BAT2, NRBP, MCM3AP, COL4A1, MKNK1, BBC3, FLJ10359, DPT, C10orf76, DIA1, PBK, PRKD2, KRT19, FLJ23436, NPHS2, C3orf14, AGTR2, HTR1F, KIF3B, DCN, STK22C, DKFZp566C0424, CNR1, HOMER3, GPR2, FLJ12442, XLKD1, CASKIN2, COL5A2, BRD3, ATP6V0A4, PRODH2, EPHB2, LYAR, COX6B, PRH1, LAPTM5, RPS6KA4, GCC2, FGF2, MMP14, and ERBB2 genes as markers for predicting the prognosis of kidney cancer or as markers for metastasis of kidney cancer, homologs thereof, mutants thereof, or derivatives thereof, the first example comprises one or more, and preferably two or more antibodies against such polypeptides, mutants thereof, or fragments thereof.

[0319] Specifically, the probes comprised in the kit are: one or more antibodies that bind specifically to at least one of polypeptides each comprising the amino acid sequence as shown in any of SEQ ID NOS: 101 to 110, 112 to 120, and 122 to 147, mutants thereof, or fragments thereof; fragments thereof; or chemically modified derivatives.

[0320] The kit can further comprise an antibody against a polypeptide having the amino acid sequence as shown in any of SEQ ID NOS: 111, 121, and 148 to 150, a fragment thereof, or a chemically modified derivative thereof. Use of such antibodies in combination can improve the accuracy for predicting metastasis or prognosis after surgery.

[0321] The second example includes one or more antibodies against the polypeptides encoded comprising the amino acid sequences as shown in SEQ ID NOS: 151, 153, and 155 to 160 and in SEQ ID NOS: 161 to 190 of group II (g) and (h) as kidney cancer markers, fragments thereof, or chemically modified derivatives thereof.

[0322] The kit can further comprise an antibody against a polypeptide having the amino acid sequence as shown in any of SEQ ID NOS: 152, 154, and 191, and 192 to 197, a fragment thereof, or a chemically modified derivative thereof. Use of such antibodies in combination can improve the accuracy for detecting kidney cancer.

[0323] The antibodies comprised in the kit of the present invention can be present singly or in the form of a mixture. Alternatively, the antibodies may be bound onto a solid-phase carrier or may be in the free form. Further, the kit of the present invention can comprise a labeled secondary antibody, a carrier, a washing buffer, a sample diluent, a substrate for enzyme, a reaction terminator, a marker (target) polypeptide(s) as purified standard(s), instructions, and so on.

### 5. DNA Chip

[0324] The present invention further provides a DNA chip for detecting kidney cancer or predicting the prognosis or metastasis of kidney cancer using the same polynucleotide(s) as the polynucleotide(s) comprised in the composition and/or the kit of the present invention as described in Sections 3 and 4 above, a mutant(s) thereof, or a fragment(s) thereof, alone or in combination, preferably in combination.

[0325] A substrate of the DNA chip is not particularly limited, provided that the substrate can comprise DNAs immobilized thereon. Examples of the substrate include a glass slide, a silicon chip, a polymer chip, and a nylon membrane. Such substrates may be subjected to surface treatment, for example, poly-L-lysine coating or introduction of a functional group such as an amino or carboxyl group.

[0326] DNA can be immobilized on a substrate by any common techniques without particular limitation. Examples of such techniques include a method wherein DNA is spotted using a high-density dispenser, called spotter or arrayer, a method of spraying DNA on a substrate using an apparatus (i.e., inkjet), which jets fine droplets from a nozzle by a piezoelectric element, and a method of synthesizing nucleotides successively on a substrate. When the high-density dispenser is used, for example, different gene solutions are first placed into each well of a multi-well plate, and the solutions are taken out of the plate using a pin (i.e., needle) and are successively spotted on the substrate. According to the inkjet technique, genes are jetted through a nozzle, and the genes are arrayed on the substrate at a high speed. In the DNA synthesis on the substrate, a nucleotide on the substrate is protected with a functional group, which is capable of leaving from the substrate by light, and light is selectively applied only to a nucleotide at a specific position by using a mask, thereby deprotecting the functional group. Thereafter, nucleotides are added to the reaction mixture, which nucleotides are coupled to the nucleotides on the substrate, and this step is repeated.

[0327] Polynucleotides to be immobilized are the polynucleotides of the present invention as described above.

[0328] Examples of such polynucleotides can comprise one or more of the following polynucleotides or fragments thereof:

[0329] (1) polynucleotides each consisting of a nucleotide sequence as shown in any of SEQ ID NOS: 1 to 50, mutants thereof, or fragments comprising at least 15 continuous nucleotides thereof;

[0330] (2) polynucleotides each comprising a nucleotide sequence as shown in any of SEQ ID NOS: 1 to 50;

[0331] (3) polynucleotides each consisting of a nucleotide sequence as shown in any of SEQ ID NOS: 1 to 10, 12 to 20, and 22 to 47, mutants thereof, or fragments comprising at least 15 continuous nucleotides thereof;

[0332] (4) polynucleotides each comprising a nucleotide sequence as shown in any of SEQ ID NOS: 1 to 10, 12 to 20, and 22 to 47, mutants thereof, or fragments comprising at least 15 continuous nucleotides thereof;

[0333] (5) polynucleotides each consisting of a nucleotide sequence complementary to a nucleotide sequence as shown in any of SEQ ID NOS: 1 to 10, 12 to 20, and 22 to 47, mutants thereof, or fragments comprising at least 15 continuous nucleotides thereof;

[0334] (6) polynucleotides each comprising a nucleotide sequence complementary to a nucleotide sequence as shown in any of SEQ ID NOS: 1 to 10, 12 to 20, and 22 to 47;

[0335] (7) polynucleotide each hybridizing under stringent conditions to DNA consisting of a nucleotide sequence complementary to a nucleotide sequence as shown in any of SEQ ID NOS: 1 to 10, 12 to 20, and 22 to 47 or fragments comprising at least 15 continuous nucleotides thereof;

[0336] (8) polynucleotides each hybridizing under stringent conditions to DNA consisting of a nucleotide sequence as shown in any of SEQ ID NOS: 1 to 10, 12 to 20, and 22 to 47 or fragments comprising at least 15 continuous nucleotides thereof;

[0337] (9) a polynucleotide consisting of the nucleotide sequence as shown in any of SEQ ID NOS: 11, 21, and 48 to 50, mutants thereof, or fragments comprising at least 15 continuous nucleotides thereof;

[0338] (10) polynucleotides comprising a nucleotide sequence as shown in any of SEQ ID NOS: 11, 21, and 48 to 50, mutants thereof, or fragments comprising at least 15 continuous nucleotides thereof;

[0339] (11) polynucleotides consisting of a nucleotide sequence complementary to a nucleotide sequence as shown in SEQ ID NOS: 11, 21, and 48 to 50, mutants thereof, or fragments comprising at least 15 continuous nucleotides thereof;

[0340] (12) polynucleotides comprising a nucleotide sequence complementary to the nucleotide sequence as shown in any of SEQ ID NOS: 11, 21, and 48 to 50;

[0341] (13) polynucleotides each hybridizing under stringent conditions to DNA consisting of a nucleotide sequence complementary to a nucleotide sequence as shown in any of SEQ ID NOS: 11, 21, and 48 to 50 or fragments comprising at least 15 continuous nucleotides thereof;

[0342] (14) polynucleotides each hybridizing under stringent conditions to DNA consisting of a nucleotide sequence as shown in any of SEQ ID NOS: 11, 21, and 48 to 50 or fragments comprising at least 15 continuous nucleotides thereof;

[0343] (15) a polynucleotide comprising at least 15 continuous nucleotides in a nucleotide sequence as shown in any of SEQ ID NOS: 1 to 10, 12 to 20, and 22 to 47 or a complementary sequence thereof;

[0344] (16) a polynucleotide comprising at least 60 continuous nucleotides in a nucleotide sequence as shown in any of SEQ ID NOS: 1 to 10, 12 to 20, and 22 to 47 or a complementary sequence thereof;

[0345] (17) a polynucleotide comprising at least 15 continuous nucleotides in a nucleotide sequence as shown in any of SEQ ID NOS: 11, 21, and 48 to 50 or a complementary sequence thereof;

[0346] (18) a polynucleotide comprising at least 60 continuous nucleotides in a nucleotide sequence as shown in any of SEQ ID NOS: 11, 21, and 48 to 50 or a complementary sequence thereof;

[0347] (19) a polynucleotide comprising a nucleotide sequence as shown in any of SEQ ID NOS: 51 to 60, 62 to 70, and 72 to 97 and at least 60 continuous nucleotides in a nucleotide sequence as shown in any of SEQ ID NOS: 1 to 10, 12 to 20, and 22 to 47;

[0348] (20) a polynucleotide comprising a nucleotide sequence comprising a sequence complementary to a nucleotide sequence as shown in any of SEQ ID NOS: 51 to 60, 62 to 70, and 72 to 97 and at least 60 continuous nucleotides in a nucleotide sequence complementary to a nucleotide sequence as shown in any of SEQ ID NOS: 1 to 10, 12 to 20, and 22 to 47;

[0349] (21) a polynucleotide comprising a nucleotide sequence as shown in any of SEQ ID NOS: 61, 71, and 98 to 100 and at least 60 continuous nucleotides in a nucleotide sequence as shown in any of SEQ ID NOS: 11, 21, and 48 to 50; and

[0350] (22) a polynucleotide comprising a sequence complementary to a nucleotide sequence as shown in any of SEQ ID NOS: 61, 71, and 98 to 100 and at least 60 continuous nucleotides in a nucleotide sequence as shown in any of SEQ ID NOS: 11, 21, and 48 to 50.

[0351] According to a preferable embodiment, the DNA chip of the present invention can include at least 2 or all polynucleotides each comprising a nucleotide sequence as shown in any of SEQ ID NOS: 51 to 60, 61, 62 to 70, 71, 72 to 97, and 98 to 100 or a complementary sequence thereof.

[0352] According to the present invention, the polynucleotides to be immobilized may be any of genomic DNA, cDNA, RNA, synthetic DNA, and synthetic RNA, or alternatively they may be single-stranded or double-stranded.

[0353] Examples of DNA chips that can detect and determine the expression levels of the target gene, RNA, or cDNA include the Gene Chip Human Genome U133 Plus 2.0 Array (Affymetrix), the Whole human genome oligo microarray (Agilent), the IntelliGene® HS Human Expression CHIP (Takara Bio), and a polymethylmethacrylate DNA chip substrate having a concave-convex structure (JP Patent Publication (kokai) No. 2004-264289 A).

[0354] DNA microarrays can be prepared by, for example, a method wherein probes that have been prepared in advance are immobilized on a solid-phase surface. In this method, polynucleotides into which functional groups have been introduced are synthesized, and oligonucleotides or polynucleotides are spot-deposited on the surface of a surface-treated solid-phase support, followed by covalent binding to the surface (e.g., J. B. Lamture et al., Nucleic. Acids. Research, 1994, vol. 22, pp. 2121-2125; Z. Guo et al., Nucleic. Acids. Research, 1994, vol. 22, pp. 5456-5465). In general, the polynucleotides are covalently bound to the surface-treated solid-phase support via a spacer or crosslinker. The method wherein fine pieces of polyacrylamide gel are aligned on the glass surface and synthetic polynucleotides are covalently bound thereto is also known (G. Yershov et al., Proceedings of the National Academic Sciences, U.S.A., 1996, vol. 94, p. 4913). As a further method, a microelectrode array is prepared on silica microarray, a reaction site is formed on the electrode by providing a permeable layer of streptavidin-containing agarose, this site is positively charged to immobilize the biotinylated polynucleotides thereon, and the charge at the site is regulated. This enables performance of hybridization at a high speed under stringent condition (R. G. Sosnowski et al., Proceedings of the National Academic Sciences, U.S.A., 1997, vol. 94, pp. 1119-1123).

6. Method for Detecting and Identifying the Presence of Kidney Cancer and/or for Predicting the Prognosis or Metastasis of Kidney Cancer

[0355] The present invention provides a method for predicting in vitro the subject's prognosis and/or the presence or absence of metastasis of kidney cancer comprising comparing the expression level of the target nucleic acids in a biological sample of kidney cancer cells from a subject with the expression level of the target nucleic acids in the kidney cancer cells from patients with poor prognoses and/or the expression level of the target nucleic acids in the kidney cancer cells from patients with good prognoses, by using the composition, kit, or DNA chip of the present invention, or combinations thereof, wherein the target nucleic acids can be detected by the polynucleotides in the composition, kit, or DNA chip, mutants thereof, or fragments thereof, and, when the expression level of the target nucleic acids in the subject is changed compared with that in the patients with good prognoses or poor prognoses and/or that in the patients with poor prognoses, the subject is determined to have poor or good prognosis, and/or the metastasis of kidney cancer is determined to have or have not occurred.

[0356] The present invention also provides use of the composition, kit, or DNA chip of the present invention for detecting in vitro the kidney cancer cells suspected of being at risk for metastasis in an analyte sample from a subject.

[0357] The above-described method of the present invention involves the use of the composition, kit, or DNA chip of the present invention comprising the polynucleotides of the present invention, mutants thereof, or fragments thereof alone or in any possible combination.

[0358] In the method for predicting, detecting, identifying, or (genetically) diagnosing the metastasis of kidney cancer and/or for predicting the prognosis for kidney cancer patients of the present invention, the polynucleotides comprised in the composition, kit, or DNA chip of the present invention, mutants thereof, or fragments thereof can be used as primers or detection probes (searchers). When used as primers, for example, primers comprising generally 15 to 50 nucleotides, preferably 15 to 30 nucleotides, and more preferably 18 to 25 nucleotides can be used. When used as detection probes, for example, polynucleotides comprising 15 to all nucleotides, preferably 25 to 1000 nucleotides, more preferably 25 to 100 nucleotides can be used. It should be understood that the number of nucleotides should not be limited to the specific ranges.

[0359] The polynucleotides, mutants thereof, or fragments thereof that are comprised in the composition or kit of the present invention can be used as primers or probes in accordance with the conventional techniques in known methods for specifically detecting a given gene, such as Northern blotting, RT-PCR, in situ hybridization, or Southern hybridization. As to samples to be tested (or analytes), the whole or part of the kidney tissue or the body tissue suspected of being at risk for having kidney cancer cells of a subject may be removed by biopsy or another means, or the samples may be removed from the body tissue excised by surgery, depending on types of detection methods. Further, total RNA prepared therefrom in accordance with the conventional techniques may be used, or various polynucleotides including cDNA or poly A(+) RNA prepared from the RNA may be used.

[0360] Alternatively, the expression levels of nucleic acids such as the gene, RNA, or cDNA of the present invention in the body tissue can be detected or quantified using a DNA chip (including a DNA microarray). In this case, the composition or kit of the present invention can be used as a DNA array probe (e.g., the Human Genome U133 Plus 2.0 Array (Affymetrix) uses a polynucleotide probe having 25 nucleotides). Such a DNA array may be hybridized to the labeled DNA or RNA, which is prepared from RNA removed from the body tissue, and a complex of the probe with the labeled DNA or RNA resulting from such hybridization may be detected using the labeled DNA or RNA as an indication to evaluate the presence or absence of the expression of the genes associated with kidney cancer metastasis or genes associated with prognosis for the cancer patient or the expression levels thereof in the body tissue. In the method of the present invention, a DNA chip is preferably used. This enables the simultaneous evaluation of the presence or absence of the expression of a plurality of genes, or the simultaneous evaluation of the expression levels of the genes, in a single biological sample.

[0361] The composition, kit, or DNA chip of the present invention is useful for predicting the prognosis for a kidney cancer patient and/or predicting, identifying, or detecting metastasis of kidney cancer (e.g., diagnosis of affection or degree of affection). Specifically, prognosis for a kidney cancer patient and/or metastasis of kidney cancer can be predicted using the composition, kit, or DNA chip in the following manner. That is, the body tissue of the subject having kidney cancer cells can be subjected to the assay of the expression levels of the genes that are detected with the use of such diagnostic composition. In this case, the term “differences in gene expression levels” refers to not only the presence or absence of the expression but also the case where differences in gene expression levels between the body tissue comprising kidney cancer cells from a patient with a good prognosis and the body tissue comprising kidney cancer cells from a patient with a poor prognosis are statistically significant (p value of <0.05). For example, the expression of the PABPN1 gene is induced/decreased in kidney cancer cells from a patient with poor prognosis. Thus, its expression is increased/decreased in kidney cancer tissue from a subject with poor prognosis. If the differences between such expression level and the expression level in the normal tissue are significant, the subject is suspected of being at risk for kidney cancer metastasis and is also predicted to have poor prognosis.

[0362] A method for detecting kidney cancer (cells) using the composition, kit, or DNA chip of the present invention comprises: removing the whole or part of the body tissue from a subject via biopsy or recovering it from the body tissue excised by surgery; detecting the genes contained therein using a polynucleotide or polynucleotides selected from the polynucleotides of the present invention, mutants thereof, or fragments thereof; measuring the expression levels of said genes; and predicting metastasis of kidney cancer, diagnosing the presence or absence of metastasis of kidney cancer or a degree thereof, and/or predicting the prognosis for a kidney cancer patient. Also, the method for predicting metastasis of kidney cancer according to the present invention can detect, identify, or predict amelioration or the degree of amelioration of the disease when a therapeutic agent is administered to an kidney cancer bearing patient, for example.

[0363] The method of the present invention can comprise, for example, the following steps (a), (b), and (c) of:

[0364] (a) bringing a biological sample of a subject into contact with a polynucleotide or polynucleotides comprised in the composition, kit, or DNA chip of the present invention;

[0365] (b) measuring the expression level of the target nucleic acid(s) in the biological sample using the polynucleotide or polynucleotides as the probe; and

[0366] (c) predicting the prognosis for kidney cancer patients and/or identifying the presence or absence of kidney cancer (cells) suspected of being at risk for metastasis in the biological sample on the basis of the results obtained in step (b).

[0367] Examples of biological samples used in the method of the present invention include the body tissues of a subject, for example, samples prepared from kidney tissue and peripheral tissue thereof, tissue suspected of being at risk for having the metastasis of kidney cancer, and the like. Specifically, an RNA containing sample prepared from such tissue or a sample containing a polynucleotide prepared therefrom may be prepared by removing the whole or part of the body tissue from the subject via biopsy, or recovering the sample from the body tissue excised by surgery to prepare the sample therefrom in accordance with conventional techniques.

[0368] The term “subject” as used herein refers to a mammalian animal. Examples thereof include, but are not limited to, human, monkey, mouse, and rat, preferably human.

[0369] In the method of the present invention, the above-mentioned steps may be varied depending on types of biological samples used as analytes.

[0370] When RNA is used as the analyte, for example, detection of kidney cancer (cells) can comprise the following steps (a), (b), and (c) of:

[0371] (a) allowing RNA prepared from a biological sample of a subject or a complementary polynucleotide (cDNA) transcribed therefrom to bind to a polynucleotide comprised in the composition, kit, or DNA chip of the present invention;

[0372] (b) measuring the RNA prepared from the biological sample bound to the polynucleotide or a complementary polynucleotide transcribed from the RNA using the above polynucleotide as a probe; and

[0373] (c) identifying the presence or absence of kidney cancer (cells) from a patient with a poor prognosis based on the results obtained in step (b).

[0374] In order to detect, identify, or diagnose the metastatic kidney cancer (cells) by the method of the present invention, for example, various hybridization techniques can be employed. Examples of the hybridization techniques that can be employed include Northern blotting, quantitative Southern blotting, RT-PCR, DNA chip analysis, in situ hybridization, and Southern hybridization.

[0375] When Northern blotting is employed, the diagnostic composition of the present invention can be used as a probe to detect and assay the presence or absence of gene expression in RNA or the expression level thereof. Specifically, the diagnostic composition (specifically a complementary strand) of the present invention is labeled with a radioisotope (e.g., ³²P, ³³P, or ³⁵S) or a fluorophore, the resultant is hybridized to the RNA obtained from a body tissue of a subject that has been transferred onto a nylon membrane or the like in accordance with any of the conventional techniques, the resulting double-strand of the diagnostic composition (i.e., DNA) and RNA can be measured by detecting a signal derived from a label (a radioisotope or fluorophore) of the diagnostic composition using a radio detector (e.g., BAS-1800 II, Fuji Photo Film, Japan) or a fluorescent detector (STORM 860, Amersham Bioscience).

[0376] When the quantitative RT-PCR is employed, the diagnostic composition of the present invention can be used as a primer to detect and assay the presence or absence of the gene expression in RNA or the expression level thereof. Specifically, cDNA is prepared from RNA of a body tissue of a subject in accordance with a conventional technique, a pair of primers prepared from the diagnostic composition of the present invention (i.e., a forward strand and a reverse strand, both bound to the cDNA) is hybridized to cDNA to perform PCR with the use of cDNA as a template in accordance with the conventional technique, thereby amplifying the target gene regions, and the resulting double-stranded DNA is detected. Double-stranded DNA can be detected by a method wherein PCR is carried out using a primer that has been labeled with a radioisotope or fluorophore in advance, a method wherein the PCR product is electrophoresed on agarose gel, and double-stranded DNA is detected by staining the same with ethidium bromide or the like, or a method wherein the resulting double-stranded DNA is transferred to a nylon membrane or the like in accordance with a conventional technique, and the resultant is subjected to hybridization to the labeled diagnostic composition as a probe to detect the substance of interest.

[0377] When the DNA array analysis is employed, a DNA chip comprising the diagnostic composition of the present invention as a DNA probe (single-stranded or double-stranded) bound to a substrate is used. A substrate comprising genes immobilized thereon is generally referred to as DNA chip or DNA array. Examples of the DNA array include a DNA macroarray and a DNA microarray. As used herein, the term “DNA chip” refers to such DNA arrays.

[0378] Hybridization conditions are not particularly limited. For example, hybridization is carried out in 3 to 4×SSC and 0.1% to 0.5% SDS at 30° C. to 50° C. for 1 to 24 hours, more preferably in 3.4×SSC and 0.3% SDS at 40° C. to 45° C. for 1 to 24 hours, followed by washing. Washing is continuously carried out, for example, with a solution containing 2×SSC and 0.1% SDS, with a solution of 1×SSC, and with a solution of 0.2×SSC at room temperature. The term “1×SSC” refers to an aqueous solution containing 150 mM sodium chloride and 15 mM sodium citrate (pH 7.2). Preferably, a complementary strand remains hybridized to the target (+) strand even if it is washed under such conditions. Specific examples of such complementary strand include a strand consisting of the nucleotide sequence completely complementary to the nucleotide sequence of the target (+) strand, and a strand consisting of a nucleotide sequence having at least 80% identity with said strand.

[0379] When PCR is carried out under stringent hybridization conditions using polynucleotide fragments obtained from the composition or kit of the present invention as primers, for example, a PCR buffer comprising 10 mM Tris-HCl (pH 8.3), 50 mM KCl, and 1 to 2 mM MgCl₂ is used, and the treatment is carried out at a temperature, Tm—(5 to 10° C.) which is calculated from the primer sequence, for about 15 seconds to 1 minute. The Tm value can be calculated, for example, by the equation Tm=2×(the number of adenine residues+the number of thymine residues)+4×(the number of guanine residues+the number of cytosine residues).

[0380] Another example of the “stringent conditions” for hybridization is described in, for example, Sambrook, J. & Russel, D., Molecular Cloning, A LABORATORY MANUAL, Cold Spring Harbor Laboratory Press, Jan. 15, 2001, vol. 1: 7.42 to 7.45, vol. 2: 8.9 to 8.17, and such conditions can be employed in the present invention.

[0381] The present invention also provides a method for predicting the prognosis for a kidney cancer patient by assaying the expression levels of target nucleic acids or genes in the biological sample from a subject using one or more probes of group I and/or group II, the composition, kit, or DNA chip of the present invention, or combinations thereof and using a discriminant, i.e., the support vector machine (SVM), using the gene expression levels in the kidney cancer tissue from a patient with good prognosis and the kidney cancer tissue from a patient with poor prognosis as the training samples, and/or a method for determining whether or not the biological sample contains metastatic kidney cancer cells.

[0382] The present invention further provides a method for detecting, identifying, or predicting the metastasis of kidney cancer, the method comprising the steps of:

[0383] (1) measuring in vitro expression levels of target nucleic acids in a plurality of biological samples that are known to be the tissue which contains kidney cancer cells obtained from a patient with a poor prognosis and/or the tissue which contains kidney cancer cells obtained from a patient with a good prognosis using a probe or probes selected from group I as defined above, the composition, the kit, or the DNA chip comprising the probe or probes;

[0384] (2) preparing a discriminant, a support vector machine, using, as training samples, the expression levels of the target nucleic acids determined in step (1);

[0385] (3) measuring in vitro expression levels of the target nucleic acids in a biological sample obtained from the kidney cancer cells of the subject in the same manner as in step (1); and

[0386] (4) assigning the expression levels of the target nucleic acids identified in step (3) to the discriminant prepared in step (2) and, based on the results obtained with the use of the discriminant, predicting the prognosis for a subject and/or determining whether or not kidney cancer of the subject is metastatic or nonmetastatic, provided that the target nucleic acids can be detected by the polynucleotides, mutants thereof, or fragments thereof contained in the composition, kit, or DNA chip.

[0387] Alternatively, the method of the present invention can comprise the following steps (a), (b), and (c) of:

[0388] (a) measuring the expression levels of the target genes in the biological samples that are known to be the tissue containing the kidney cancer cells from a patient with good prognosis or the tissue containing the kidney cancer cells from a patient with poor prognosis using the composition for diagnosis (detection), kit, or DNA chip of the present invention;

[0389] (b) preparing a discriminant (i.e., support vector machine) by assigning the expression levels determined in step (a) into the equations 1 to 5 below; and

[0390] (c) assaying the expression levels of the target genes in the biological sample from a subject using the composition for diagnosis (detection), kit, or DNA chip of the present invention, and assigning the determined values into the discriminant prepared in step (b), in order to predict the prognosis for a kidney cancer patient and/or determine whether or not the biological sample contains metastatic kidney cancer cells based on the obtained results.

[0391] SVM is a learning machine that was proposed in the framework of a statistical learning theory made to solve a two-class classification problem, by V. Vapnik of AT&T in 1995 (The Nature of Statistical Leaning Theory, Springer, 1995). SVM is a linear classifier but it can solve nonlinear problems in combination with the Kernel method as described below. Among many hyperplanes that classify training samples of different classes, the hyperplane that maximizes the minimum distance from the hyperplane to the training sample may be defined as the classification plane to classify a new test sample in the most accurate manner.

[0392] SVM can only solve linear problems. As a method for solving substantially nonlinear problems, a method wherein a feature vector is nonlinearly transformed into a higher-dimensional feature, and linear classification is then performed, is known. This becomes equivalent to the use of a nonlinear model in an original space. High-dimensional mapping, however, requires an enormous computational effort and reduces a generalization capability. According to SVM, the classification function depends exclusively on the inner product of the inputted pattern. Accordingly, if the inner product could be calculated, the optimal classification function could be constructed. The formula that represents the inner product of two elements in a nonlinearly mapped space only by the input in original spaces is referred to as the Kernel formula. An optimal classification function, i.e. a discriminant, can be formed only by the Kernel formula without computation of features in the actually mapped space while performing high-dimensional mapping (e.g., Hideki Asou et al., Toukei kagaku no furontia 6 (Frontier of statistical science 6), “Pataan ninshiki to gakushu no toukeigaku (Statistics of pattern recognition and learning),” pp. 107-138, Iwanami Shoten Publishers, Tokyo, Japan, date of publication, Apr. 11, 2003).

[0393] Examples of the computation of a discriminant that can be used in the method of the present invention are shown below.

[0394] In order to identify SVM, the expression levels of the target gene in biological samples that are known to be a kidney cancer cell-containing tissue from a patient with good prognosis or kidney cancer tissue from a patient with poor prognosis is provided as training samples, and a constant of the classification function can be identified in the following manner.

[0395] The training sample xᵢ is assumed to belong to either a group of kidney cancer cell-containing tissue from a patient with a good prognosis or kidney cancer tissue from a patient with a poor prognosis, which groups are classified into (+) or (−). When training samples can be linearly separated by the hyperplane, the classification function is, for example, as follows:

$$f ( x ) = {\sum }_{i = 1}^{n} {w}_{i} \cdot {x}_{i} + b \qquad [ equation 1 ]$$

where w represents a weighting factor, b represents a bias constant, and x represents a sample variable.

[0396] This function, however, has a restriction:

yᵢ(w^{T}xᵢ+b)≧1−ξᵢ

ξ≧0,i=1, . . . , n [equation 2]

where T represents an inner product, y represents a sample class, and ξ represents a slack variable. Thus, the Lagrange's method of unidentified multipliers may be used to regress to the following optimization problem using the Lagurange multiplier α.

$$\begin{matrix}{max}_{α} {\sum }_{i = 1}^{n} {α}_{i} - \frac{1}{2} {\sum }_{i , j = 1}^{n} {α}_{i} {α}_{j} {y}_{i} {y}_{j} {x}_{i}^{T} {x}_{j} & [ equation 3 ] \\ 0 \leq {α}_{i} \leq C , {\sum }_{i = 1}^{n} {α}_{i} {y}_{i} = 0 & [ equation 4 ]\end{matrix}$$

where C represents a restriction parameter identified by an experiment.

[0397] If the above problem is dissolved, the following formula is consequently obtained.

$$w = {\sum }_{i = 1}^{n} {α}_{i} {y}_{i} {x}_{i} \\ b = - \frac{1}{2} ( {w}^{T} {x}_{A} + {w}^{T} {x}_{B} ) \qquad [ equation 5 ]$$

Thus, the nonambiguous classification function can be identified. By assigning x concerning a new biological sample (i.e., the gene expression level in a tissue, whether or not the tissue contains metastatic kidney cancer cells is not known) to this function, f(x) can be classified into (+) or (−), and the biological sample can be classified into the group of kidney cancer cell-containing tissue from a patient with a good prognosis or the group of kidney cancer cell-containing tissue from a patient with a good prognosis.

[0398] Thus, two groups of training samples are necessary in order to prepare a SVM discriminant for classifying unknown samples. According to the present invention, such training samples are, for example, a set of samples obtained from patients of “the expressed genes (x₁, x₂, . . . xᵢ, . . . xₙ) obtained from the kidney cancer tissue of patients with good prognoses or poor prognoses” and a set of samples obtained from the patients of “the expressed genes (x₁, x₂, . . . xᵢ, . . . xₙ) obtained from the kidney cancer tissue of patients with poor prognoses.” The number (n) of the expressed genes concerning such sets varies depending on the design of the experiment. The expression levels of each gene yield significant difference, relatively small difference, or no difference between the two groups regardless of the type of experiment. In order to improve the accuracy of the SVM discriminant, distinctive differences are required between 2 groups of training samples. Thus, it is necessary to selectively extract and use genes that exhibit different expression levels between 2 groups from among gene sample sets.

[0399] Examples of methods for extracting genes that exhibit different expression levels between 2 groups include a t-test which is a parametric analysis for detecting different means and an U-test of Mann-Whitney which is a non-parametric analysis. As a method that utilizes survival analysis, the plots of the survival curve obtained by the Kaplan-Meier method are analyzed by the log-rank test or the Wilcoxon test. Also, a method wherein a survival curve is used as a regression model and analyzed by the Cox proportional hazards model is particularly useful to deduce whether or not a given variable is associated with survival. Specifically, the Cox proportional hazards model indicates how sufficiently a variety of variables describe the regression model concerning a plurality of survival curves plotted by the Kaplan-Meier method of the group of patients classified in accordance with a given category.

[0400] In the method of the present invention, for example, any combination of one or more of the aforementioned polynucleotides as shown in any of SEQ ID NOS: 1 to 10, 12 to 20, and 22 to 47 and one or more of polynucleotides as shown in any of SEQ ID NOS: 11, 21, and 48 to 50 may be used. Also, the fact that the expression levels of the 50 types of target genes in tissue containing kidney cancer cells from a patient with a good prognosis are significantly different from those in tissue containing kidney cancer cells from a patient with poor prognosis, and that such expression levels vary in tissue containing kidney cancer cells from a patient with poor prognosis, are used as indications to determine the expression levels of the 50 types of genes. Thus, the prediction of the prognosis for a kidney cancer patient and/or the distinction of the metastasis of kidney cancer can be performed at the probability of 85% or higher, 89% or higher, 90% or higher, preferably 92% or higher, more preferably 93% or higher, and further preferably 94% or higher (FIG. 2).

[0401] The present invention further provides a method for predicting the prognosis of kidney cancer or for detecting, identifying, or predicting the metastasis of kidney cancer, comprising measuring in vitro the expression levels of the polypeptides or the blood levels (or existing amounts) of the polypeptides in tissue containing kidney cancer cells from a patient with a good prognosis and in tissue containing kidney cancer cells from a patient with a poor prognosis, by using one or more antibodies against respective polypeptides encoded by the aforementioned 50 types of genes (e.g., those as shown in SEQ ID NOS: 1 to 50) or fragments thereof (e.g., as shown in SEQ ID NOS: 51 to 100), such as polypeptides consisting of the respective amino acid sequences as shown in SEQ ID NOS: 101 to 150, or fragments thereof.

[0402] The present invention also provides a method for detecting, identifying, or predicting kidney cancer, comprising measuring in vitro the expression levels of the polypeptides between kidney cancer tissue and non-cancerous tissue or the blood levels of the polypeptides (or the existing amounts), by using one or more, for example, 2 or more, 3 or more, or 5 or more to all antibodies against the respective polypeptides encoded by the aforementioned 47 genes (e.g., those as shown in SEQ ID NOS: 151 to 160, and 191 and those as shown in SEQ ID NOS: 161 to 190, and 192 to 197) or fragments thereof.

[0403] Specifically, the above mentioned measurement can be carried out by an immunological method.

[0404] Examples of immunological assay techniques include enzyme immunoassay (ELISA or EIA), fluorescence immunoassay, radio immunoassay (MA), luminescent immunoassay, immunonephelometry, latex agglutination assay, latex turbidimetry, hemagglutination, particle agglutination, and Western blotting.

[0405] When the above method is carried out by an immunoassay technique using a label, the antibody of the present invention may be immobilized, or a component in the sample may be immobilized to subject such substance to an immunological reaction.

[0406] Examples of solid-phase supports that can be used include insoluble supports in the form of beads, microplate, test tube, stick, or specimen (test strip) comprising a polystyrene, polycarbonate, polyvinyltoluene, polypropyrene, polyethylene, polyvinyl chloride, nylon, polymethacrylate, latex, gelatin, agarose, cellulose, sepharose, glass, metal, ceramic, or magnetic material.

[0407] The samples can be immobilized on the support in accordance with a conventional technique by binding the antibody of the present invention or a sample component to the solid-phase support by physical adsorption, chemical binding, or a combination thereof.

[0408] The present invention is intended to easily detect the reaction between the antibody of the present invention and the target polypeptide in the sample. To this end, the antibody of the present invention is labeled to directly detect the reaction of interest. Alternatively, a labeled secondary antibody is used to indirectly detect the reaction. In the method of detection according to the present invention, the latter indirect detection technique (e.g., the sandwich technique) is preferably employed from the viewpoint of sensitivity.

[0409] Examples of label substances that can be used for enzyme immunoassay include enzymes such as peroxidase (POD), alkaline phosphatase, β-galactosidase, urease, catalase, glucose oxidase, lactate dehydrogenase, amylase, and a biotin-avidin complex. Examples of label substances that can be used for fluorescence immunoassay include fluorescent substances such as fluorescein isothiocyanate, tetramethylrhodamine isothiocyanate, substituted rhodamine isothiocyanate, dichlorotriazine isothiocyanate, Alexa, or AlexaFluoro and fluorophores. Examples of label substances that can be used for radio immunoassay include radioactive isotopes, such as tritium, iodine (¹³¹I, ¹²⁵I, ¹²³I, and ¹²¹I), phosphorus (³²P and ³³P), sulfur (³⁵S), and metals (e.g., ⁶⁸Ga, ⁶⁷Ga, ⁶⁸Ge, ⁵⁴Mn, ⁹⁹Mo, ⁹⁹Tc, and ¹³³Xe). Examples of label substances that can be used for luminescent immunoassay include luminescent molecules such as an NADH-, FMNH2-, luciferase system, luminol-hydrogen peroxide-POD system, acridinium ester system, or dioxetane compound system.

[0410] Also, an avidin-biotin system or streptavidin-biotin system may be used optionally. In such a case, the antibody of the invention or a fragment thereof may be bound, for example, to biotin.

[0411] A label can be bound to the antibody in case of enzyme immunoassay, for example, via a conventional technique, such as the glutaraldehyde method, the maleimide method, the pyridyl sulfide method, or the periodic acid method. Radio immunoassay can be carried out in accordance with a conventional technique, such as the chloramine-T method or Bolton-Hunter method. Such assay techniques can be carried out in accordance with conventional techniques (Current protocols in Protein Sciences, 1995, John Wiley & Sons Inc., Current protocols in Immunology, 2001, John Wiley & Sons Inc.). When the antibody of the present invention is directly labeled, for example, a component in the sample is immobilized and brought into contact with the labeled antibody of the present invention to form a complex of the marker polypeptide and the antibody of the present invention. The unbound labeled antibody is separated by washing, and the amount of the target polypeptide in the sample can be determined based on the amount of the bound labeled antibody or the unbound labeled antibody.

[0412] When the labeled secondary antibody is used, for example, the antibody of the present invention is allowed to react with the sample (the primary reaction), then with the labeled secondary antibody (the secondary reaction). The primary reaction and the secondary reaction may be carried out in the reverse order, concurrently, or separately. The primary and secondary reactions result in the formation of a complex of immobilized target polypeptide/the antibody of the invention/labeled secondary antibody or a complex of the immobilized antibody of the invention/target polypeptide/labeled secondary antibody. The unbound labeled secondary antibody is separated by washing, and the amount of target polypeptide in the sample can be determined based on the amount of the bound labeled secondary antibody or of the unbound labeled secondary antibody.

[0413] In the enzyme immunoassay, specifically, the enzyme label is allowed to react with a substrate under optimal conditions, and the amount of the reaction product is assayed by an optical method or the like. In the fluorescence immunoassay, the fluorescent intensity from a fluorescent label is assayed. In the radio immunoassay, the radioactivity from radioactive label is assayed. In the luminescent immunoassay, the luminescent level from a luminescent reaction system is assayed.

[0414] In the method of the present invention, the generation of immune-complex aggregates in immunonephelometry, latex agglutination assay, latex turbidimetry, hemagglutination, particle agglutination, or the like is assayed by optically measuring the transmitted beam or scattered beam. When visually assayed, a solvent, such as a phosphate, glycine, Tris, or Good's buffer, can be used. Further, a reaction accelerator such as polyethylene glycol or an inhibitor of nonspecific reaction may be added to the reaction system.

[0415] The above-mentioned antibody or a fragment thereof includes, for example, a polyclonal antibody, a monoclonal antibody, a synthetic antibody, a recombinant antibody, a polyspecific antibody (including a bispecific antibody), a single chain antibody, an Fab fragment, and an F(ab′)₂ fragment. The polyclonal antibody can be prepared as a specific antibody by a so-called absorption method, which comprises binding the antibody to an affinity column to which a purified polypeptide has been bound.

[0416] The measurement can comprise the steps of: bringing an antibody labeled with a common enzyme or fluorophore or a fragment thereof into contact with a tissue section or homogenized tissue or body fluid (such as blood, blood serum, blood plasma, or urine); and qualitatively or quantitatively measuring an antigen-antibody complex. Detection is carried out by, for example, a method wherein the presence and level of a target polypeptide are measured by immunoelectron microscopy, or a method wherein the level of a target polypeptide is assayed by a conventional method, such as ELISA or a fluorescent antibody method. Thus, kidney cancer can be detected. Further, when the expression level of a target polypeptide is decreased in tissue containing kidney cancer cells from a patient with good prognosis or in tissue containing kidney cancer cells from a patient with poor prognosis, or when the blood level of such polypeptides is significantly varied in the subject afflicted with kidney cancer with poor prognosis from the subject afflicted with kidney cancer with good prognosis, the subject can be identified to have poor prognosis and/or the metastasis of kidney cancer. In other words, when the expression level or amount of the existing target polypeptide is significantly varied from normal values, the subject is identified to have kidney cancer or have kidney cancer with poor prognosis and/or metastasis. The term “significantly” as used herein means that the identified values are statistically significant.

### EXAMPLES

[0417] The present invention will be described in more detail with reference to the examples set forth below; however, it is contemplated that the technical scope of the present invention is not limited to the examples.

### Example 1

### (1) Clinical and Pathological Findings Concerning Subjects

[0418] Informed consent was obtained from 31 Japanese patients with kidney cancer, and the kidney tissues were excised from them at the time of the surgical excision of kidney cancer. The excised tissue was visually and/or histopathologically inspected to identify the kidney cancer tissue, and the kidney cancer tissue was immediately frozen and stored in liquid nitrogen.

### (2) Extraction of Total RNA and Preparation of cDNA

[0419] The tissue in the kidney cancer lesion of the kidney tissue obtained from an kidney cancer patient was used as a sample. Total RNA was prepared from the tissue using a Trizol reagent (Invitrogen) in accordance with the manufacturer's recommended protocol.

[0420] The thus obtained total RNA (1 μg) was subjected to reverse transcription using oligo (dT) primers in combination with random nonamers and using the CyScribe First-Strand cDNA Labeling Kit (GE Healthcare, Japan) in accordance with the manufacturer's recommended protocols. Cy3-dUTP (GE Healthcare) was added to total RNA obtained from the kidney cancer tissue, Cy5-dUTP (GE Healthcare) was added to reference total RNA (Stratagene), and cDNA was labeled at the time of reverse transcription in accordance with the manufacturer's recommended protocols. The labeled cDNA was purified using the QIA quick PCR purification Kit (QIAGEN) and then subjected to hybridization.

### (3) Preparation of Oligo DNA Microarray

[0421] As the oligo DNA microarrays, the GeneChip® (Human Genome U133 A, Affymetrix) and the DNA chip prepared by the method as described herein were used.

[0422] A method for preparing a DNA chip is described below. In order to determine the type of oligo DNA to be loaded at first, genes were determined using the GeneChip® (Affymetrix). The GeneChip® was operated in accordance with the protocol of the Complete GeneChip® Instrument System. As a result of the analysis using the Complete GeneChip®, 8,961 types of genes in total, i.e., the genes whose expression patterns may vary due to kidney cancer and the control genes, were extracted.

[0423] Sequences comprising 60-70 residues at sites having high sequence specificity of the extracted 8,961 types of genes were selected and synthesized while avoiding sequence overlapping. The 8,961 types of 60 or 70-mer synthetic oligo DNAs comprising oligo DNAs as shown in SEQ ID NOS: 21 to 40 were separately dissolved in 4× Solution I (Takara Bio, Japan) to a concentration of 30 μM. The resulting solutions were spotted on a DMSO-resistant coat glass for Matsunami DNA microarrays (an amino-modified oligo DNA-immobilized coat, type I; Matsunami Glass, Japan) using a spotter (GMS417 arrayer, Affymetrix) under a humidity environment of 50% to 60%.

### (4) Hybridization

[0424] The labeled cDNA (1 μg) was dissolved in an antisense oligo cocktail (QIAGEN), the resulting solution was applied to the DNA chip covered by a Gap cover glass (Matsunami Glass), and hybridization was then carried out at 42° C. for 16 hours. After hybridization, the DNA chip was washed successively with 2×SSC/0.1% SDS, 1×SSC, and 0.2×SSC.

### (5) Determination of Gene Expression Level

[0425] The DNA chip that had been subjected to hybridization in the above-described manner was scanned using the Agilent microarray scanner (Agilent) to obtain an image, and the fluorescent intensity was expressed numerically. The statistic procedures were carried out with reference to Speed, T., “Statistical analysis of gene expression microarray data,” Chapman & Hall/CRC, and Causton, H. C. et al., “A beginner's guide Microarray gene expression data analysis,” Blackwell publishing. Specifically, the data obtained by the image analysis following hybridization were converted into log values, which were then normalized by global normalization and were smoothed by LOWESS (locally weighted scatterplot smoother), and numerical correction was carried out by MAD scaling.

### (6) Prediction Scoring System

[0426] A variety of clinical information concerning all the patients was examined to perform survival analysis, and whether or not differences were observed in the years of life resulting from different clinical information was examined. For example, patients were divided into two groups: a group of patients who were diagnosed to have metastasis to organs other than the kidney at the time of surgery; and a group of patients who were not to diagnosed to have metastasis. The 2 groups were subjected to survival analysis, and the results of analysis were represented by charts by the Kaplan-Meier method (FIG. 1). In this case, significant difference (p<0.05) was observed in the survival curve by the log-rank test between the group of patients who were diagnosed to have metastasis to organs other than the kidney at the time of surgery and the other group. This indicates that prognosis for the former group differs from that for the latter group and that the patients who were diagnosed to have metastasis would have relatively poor prognosis and the other patients would have good prognosis. Thus, influence of the prognosis for the group of patients classified in accordance with the occurrence of metastasis, i.e., the survival curve, on the model was further examined by the Cox proportional hazards model, concerning the expressed genes, in order to examine the significance of the degree of conformity between the gene expression level and the survival curve. As a result, 321 types of expressed genes that would be significantly advantageous for survival and 164 types of expressed genes that would be disadvantageous for survival were obtained with the use of the post-surgery survival curve as the indication (Table 1). Thus, these genes can be used to detect the prognosis for kidney cancer patients and/or the metastasis of kidney cancer.

[0427] These genes were used to prepare a discriminant using SVM loaded on the Genomic Profiler (Mitsui Knowledge Industry, Japan). All 31 samples were analyzed by this discriminant to predict the data. All specimens were subjected to analysis. The survivals 5 years after the surgery were used as an indication to compare the kidney cancer lesions from patients with good prognoses or poor prognoses and those from patients with poor prognoses, the data concerning the most expressed genes that would be advantageous for survival were analyzed, and gene expression assayed with the use of the polynucleotides as shown in SEQ ID NOS: 1 to 19 and 48 was examined. Thus, patients with good prognoses or poor prognoses were predicted at a probability of 96% or higher (FIG. 2).

[0428] Separately, all specimens were subjected to analysis. The survivals 5 years after the surgery were used as an indication to compare the kidney cancer lesions from patients with good prognoses or poor prognoses and those from patients with poor prognoses, the data concerning the expressed genes at high ranks that would be disadvantageous for survival were analyzed, and gene expression determined with the use of the polynucleotides as shown in SEQ ID NOS: 20 to 47, 49, and 50 was examined. Thus, patients with poor prognoses were predicted at a probability of 87% or higher (FIG. 2).

[0429] In addition to the probes used above, the other probes according to the present invention can also be used for predicting the prognosis for kidney cancer.

[0430] In the above-described identification of prognosis, the SVM that identifies the kidney cancer tissue from a patient with a good prognosis and the SVM that identifies the kidney cancer tissue from a patient with a poor prognosis were simultaneously applied to the gene expression levels of an analyte tissue, and the analysis was thus performed.

[0431] When the two discriminants simultaneously yielded the result that the given analyte tissue was a kidney cancer tissue from a patient with good prognosis, or when the two discriminants yielded the result that the analyte was a kidney cancer tissue from a patient with poor prognosis, the accuracy of each diagnosis was found to be significantly higher than the accuracy attained by conventional diagnostic methods comprising the use of a single discriminant.

### Example 2

### (1) Identification of Blood Plasma Proteins in Healthy Persons and Patients with Kidney Cancer

[0432] EDTA-added blood plasma components were obtained from 5 Japanese patients with kidney cancer at an age of 50s to 70s before kidney cancer extirpation and 1 month after kidney cancer extirpation, i.e., at the healthy state.

[0433] The blood plasma was filtered through a filter (pore size 0.22 μm) to remove contaminants, and the protein concentration was adjusted to 50 mg/ml. The resulting blood plasma was further diluted in 25 mM ammonium bicarbonate solution (pH 8.0) to the concentration of 12.5 mg/ml, and molecular weight fractionation was then carried out using a hollow fiber filter (Toray, Japan). The fractionated blood plasma sample (total amount 1.8 ml, comprising 250 μg (max) of proteins) was divided into 7 fractions by reversed-phase chromatography (the ProteomeLab® PF2D System (Beckman Coulter)), lyophilized, and then redissolved in 100 μl of the 25 mM ammonium bicarbonate solution (pH 8.0). This sample was digested with trypsin ( 1/50 volumes of the protein) at 37° C. for 2 to 3 hours for peptidization. Each peptide fraction was further fractionated into 4 fractions on the ion-exchange column (KYA Technologies, Japan).

[0434] Each fraction was further fractionated on the reversed-phase column (KYA Technologies), and the eluted peptides were measured using an online-linked mass spectrometer Q-TOF Ultima (Micromass) in a survey scan mode. The resulting data was analyzed using the protein identification software MASCOT (Matrix Science), to perform exhaustive identification of proteins. As a result, about 3,500 types of proteins, which exhibit a MASCOT score of 40 or higher (the number of identified peptides: two or more), were identified from the blood plasma components before surgery and after surgery.

### (2) Comparison of the Expression of Blood Plasma Proteins of Kidney Cancer Patient Before Surgery and after Surgery

[0435] The blood plasma proteins of a kidney cancer patient identified in Example 2 (1) were compared between before surgery and after surgery. Proteins that were not expressed after surgery but were expressed before surgery in 4 or more of 6 patients were found. These proteins were found to be the polypeptides as shown in SEQ ID NOS: 151 to 160, and 191 shown in Table 2, and were found to be useful as the so-called kidney cancer markers, for detecting kidney cancer. Table 2 shows a frequency of the expression in each of the patients. Among the kidney cancer bearing patients before surgery, such expression was detected in 4 or more of 6 patients (indicated by “+”) (Table 4).

[0436] Thus, the kidney cancer can be detected by measuring the presence or amount of at least one of the above-described polypeptides using, for example, antibodies specific thereto.

TABLE 4

| SEQ | | | | | | | | |
|---|---|---|---|---|---|---|---|---|
| ID | | Gene | | | | | | |
| NO | Protein No. | Name | Pat 1 | Pat 2 | Pat 3 | Pat 4 | Pat 5 | Pat 6 |
| 151 | P54646 | AAK2 | − | + | + | + | + | + |
| 152 | Q8IW52 | SLK4 | − | − | + | + | + | + |
| 153 | Q8TC36 | SP4L | − | + | − | + | + | + |
| 154 | Q96SZ6 | C5P1 | + | − | + | + | − | + |
| 155 | Q16739 | CEGT | + | + | + | + | − | − |
| 156 | Q92185 | SI8A | + | + | − | − | + | + |
| 157 | P13861 | KAP2 | + | + | − | + | − | + |
| 158 | O60825 | F262 | + | + | − | + | + | − |
| 159 | Q99832 | TCPH | − | + | + | − | + | + |
| 160 | P29992 | GB11 | + | − | − | + | + | + |
| 191 | Q9H4Z3 | CT67 | + | − | + | − | + | + |

Pat: Patient

### Example 3

### (1) Identification of Blood Plasma Proteins in Healthy Persons and Patients with Kidney Cancer

[0437] EDTA-added blood plasma components were obtained from 7 Japanese patients with kidney cancer at an age of 50s to 70s before kidney cancer extirpation and 1 month after kidney cancer extirpation, i.e., at the healthy state.

[0438] The blood plasma was filtered through a filter (pore size 0.22 μm) to remove contaminants, and the protein concentration was adjusted to 50 mg/ml. The resulting blood plasma was further diluted in 25 mM ammonium bicarbonate solution (pH 8.0) to the concentration of 12.5 mg/ml, and molecular weight fractionation was then carried out using a hollow fiber filter (Toray, Japan). The fractionated blood plasma sample (total amount 1.8 ml, comprising 250 μg (max) of proteins) was divided into 7 fractions by reversed-phase chromatography (the ProteomeLab® PF2D System (Beckman Coulter)), lyophilized, and then redissolved in 100 μl of the 25 mM ammonium bicarbonate solution (pH 8.0). This sample was digested with trypsin ( 1/50 volumes of the protein) at 37° C. for 2 to 3 hours for peptidization. Each peptide fraction was further fractionated into 4 fractions on the ion-exchange column (KYA Technologies, Japan).

[0439] Each fraction was further fractionated on the reversed-phase column (KYA Technologies), and the eluted peptides were measured using an online-linked mass spectrometer Q-TOF Ultima (Micromass) in a survey scan mode. The resulting data was analyzed using the protein identification software MASCOT (Matrix Science), to perform exhaustive identification of proteins. As a result, about 3,500 types of proteins, which exhibit a MASCOT score of 40 or higher (the number of identified peptides: two or more), were identified from the blood plasma components before surgery and after surgery.

### (2) Comparison of the Expression of Blood Plasma Proteins of Kidney Cancer Patient Before Surgery and After Surgery

[0440] The blood plasma proteins of a kidney cancer patient identified in Example 3 (1) were compared between before surgery and after surgery. Proteins that were not expressed after surgery but were expressed before surgery in 3 or more of 7 patients were discovered. These proteins were found to be the polypeptides as shown in SEQ ID NOS: 161 to 182, 192, and 193 shown in Table 1, and were found to be useful as the so-called kidney cancer markers, for detecting kidney cancer. Table 5 shows a frequency of the expression in each of the patients. Among the kidney cancer bearing patients before surgery, such expression was detected in 3 or more of 7 patients (indicated by “+”).

[0441] Thus, the kidney cancer can be detected by measuring the presence or amount of at least one, and preferably at least 3 to 5, of the above-described polypeptides using, for example, antibodies specific thereto.

TABLE 5

| SEQ ID NO | Protein No. | Gene Name | Pat 1 | Pat 2 | Pat 3 | Pat 4 | Pat 5 | Pat 6 | Pat 7 |
|---|---|---|---|---|---|---|---|---|---|
| 161 | Q16671 | AMHR2 | − | − | + | + | − | + | − |
| 162 | O95236 | APOL3 | + | − | + | − | − | + | − |
| 163 | Q8WXF8 | DEDD2 | − | − | − | + | + | + | − |
| 164 | P07686 | HEXB | + | − | − | + | − | − | + |
| 165 | P61978 | HNRPK | − | − | + | + | + | − | − |
| 166 | P52294 | KPNA1 | − | − | + | + | − | − | + |
| 167 | Q14847 | LASP1 | − | + | − | − | + | + | − |
| 168 | O43766 | LIAS | − | − | + | | + | + | − |
| 169 | Q8TD91 | MAGEC3 | − | + | − | + | − | − | + |
| 170 | Q14934 | NFATC4 | + | + | + | − | − | − | − |
| 171 | Q96PB7 | OLFM3 | + | − | − | + | − | − | + |
| 172 | Q9H1D9 | POLR3F | + | − | + | − | + | − | − |
| 173 | NP_066955 | PPP3CB | + | − | − | − | − | + | + |
| 174 | Q15637 | SF1 | + | + | − | − | − | − | + |
| 175 | Q9UI40 | SLC24A2 | + | + | + | − | − | − | − |
| 176 | O43511 | SLC26A4 | + | + | − | + | − | − | − |
| 177 | P46721 | SLCO1A2 | − | + | − | + | + | − | + |
| 178 | P07951 | TPM2 | − | − | − | + | + | + | − |
| 179 | Q9Y5K5 | UCHL5 | − | + | + | − | + | − | − |
| 180 | Q16880 | UGT8 | + | + | − | − | + | − | − |
| 181 | P52738 | ZNF140 | + | − | + | − | − | − | + |
| 182 | Q96GC6 | ZNF274 | + | + | + | + | − | − | − |
| 192 | P08253 | MMP2 | − | + | − | + | + | + | − |
| 193 | P26842 | TNFRSF7 | + | + | − | + | − | + | − |

Pat: Patient

### (3) Comparison of the Expression of Blood Plasma Proteins of Kidney Cancer Patient Before Surgery and After Surgery

[0442] The blood plasma proteins of 7 kidney cancer patients identified in (1) above were compared between before surgery and after surgery. Kidney cancer-specific proteins that were not expressed after surgery but were expressed before surgery were discovered by comparison of the same subject. Table 6 shows proteins that were observed commonly in 5 out of 7 patients. These proteins were found to be the polypeptides as shown in SEQ ID NOS: 183 to 190 and 194 to 197 shown in Table 6, and were found to be useful as the so-called kidney cancer markers, for detecting kidney cancer.

TABLE 6

| SEQ ID NO | Protein No. | Gene Name | Pat 1 | Pat 2 | Pat 3 | Pat 4 | Pat 5 | Pat 6 | Pat 7 |
|---|---|---|---|---|---|---|---|---|---|
| 183 | Q9UJV3 | MID2 | + | + | + | + | − | − | + |
| 184 | Q05469 | LIPE | + | + | − | + | − | + | + |
| 185 | Q9UBN7 | HDAC6 | − | + | + | + | + | + | + |
| 186 | Q99798 | ACO2 | + | + | + | − | + | − | + |
| 187 | P51693 | APLP1 | + | − | + | + | − | + | + |
| 188 | P49757 | NUMB | + | + | + | + | − | + | − |
| 189 | Q14155 | ARHGEF7 | + | − | − | + | + | + | + |
| 190 | P50148 | GNAQ | + | − | − | + | + | + | + |
| 194 | O95263 | PDE8B | − | + | + | + | + | + | − |
| 195 | O75955 | FLOT1 | + | + | − | + | + | + | + |
| 196 | P06127 | CD5 | + | + | + | − | + | + | − |
| 197 | Q16610 | ECM1 | + | + | − | + | + | + | − |

Pat: Patient

### INDUSTRIAL APPLICABILITY

[0443] The present invention can provide a composition, kit, DNA chip, and method for detecting, diagnosing, and predicting metastasis of kidney cancer and/or for predicting the prognosis for kidney cancer patients, with high-specificity and high-sensitivity. Accordingly, the present invention is particularly useful in the pharmaceutical and medical industries.

The application's sequence listing, which the Patent Office published only in electronic form, follows.

SEQUENCE LISTING (197 sequences)

SEQ ID NO: 1 - DNA, 3072 bp, Homo sapiens
aatgaaggtggacacccaaatagccccaatacaaatgcctgttcaatcaaccaaacatctaagcagcacatctatgtggtagcatattgccaggccgtgagactgcgaatataaataggaaccgcccctcatctgcaggcgctcacaacctagttagcaaacagtaaaacaattaagcgcgccgtggacataggcccacttgtcctgggaaatgaggggaagctggggtttgcagtggtttgattgaagggggactacatgttagaggcacagactgggtgcaggtacacccaaaggaacgagaagagtggaaggaaacaacatccacaaagtaaccacatgctggcgtatcgaaggccgtgatttacggttttgagactttacctcgccagcaaaggggggccagtctgttagcggtgcagattggaggggtgacattggaagctgtccaggaaaaagaaaatggaactggggagcagaaggcctacgcaagagggcgggacagacaggacttgtgactagtagctctggactgaggaatcctccctgctttctggtgcgggagagctagtggatgatggtgccaataacctggatggggaaagtaagctccctcctggaatgcttcattcacaacctccattttcagcaacatcccatctactggtgcttcctggtcgagatacaagtttcctgaaactgctgctctgttttgggcctcacccggccaacagctcactagctggcaagcagtagtatcaagatggcggccccctaggactggctagtcatgtgacctcgggtttcccaagtttgaagcccggcagtcctttcgggggcaaggttcacctgtcacgaaacgagtgtcaccccttcgactctcgcaagccaatcggcatctgagactgggccactgcggtgaggcgatcggaagattggtcctttccagtcgcctagctagggccaatcacggagcgtcccatacttcgcgggcccgcccgtaggccggggagaagcaggaatatcgtcacagcgtggcggtattattacctaaggactcgataggaggtgggacgcgtgttgattgacaggcagatttccctaccgggatttgagaatttggcgcagtgcccgccttagaggtgcgcttatttgattgccaagtaatattccccaatggagtactagctcatggtgacgggcaggcagcttgagctaatgagtcctccgtggccggcgcagctctccacatgccgggcggcgggccccagtctgagcggcgatggcggcggcggcggcggcggcagcagcagcgggggctgcgggcggtcggggctccgggccggggcggcggcgccatcttgtgcccggggccggtggggaggccggggagggggccccggggggcgcaggggactacgggaacggcctggagtctgaggaactggagcctgaggagctgctgctggagcccgagccggagcccgagcccgaagaggagccgccccggccccgcgcccccccgggagctccgggccctgggcctggttcgggagcccccggcagccaagaggaggaggaggagccgggactggtcgagggtgacccgggggacggcgccattgaggacccggagctggaagctatcaaagctcgagtcagggagatggaggaagaagctgagaagctaaaggagctacagaacgaggtagagaagcagatgaatatgagtccacctccaggcaatgctggcccggtgatcatgtccattgaggagaagatggaggctgatgcccgttccatctatgttggcaatgtggactatggtgcaacagcagaagagctggaagctcactttcatggctgtggttcagtcaaccgtgttaccatactgtgtgacaaatttagtggccatcccaaagggtttgcgtatatagagttctcagacaaagagtcagtgaggacttccttggccttagatgagtccctatttagaggaaggcaaatcaaggtgatcccaaaacgaaccaacagaccaggcatcagcacaacagaccggggttttccacgagcccgctaccgcgcccggaccaccaactacaacagctcccgctctcgattctacagtggttttaacagcaggccccggggtcgcgtctacaggggccgggctagagcgacatcatggtattccccttactaaaaaaagtgtgtattaggaggagagagaggaaaaaaagaggaaagaaggaaaaaaaaaagaattaaaaaaaaaaaaaagaaaaacagaagatgaccttgatggaaaaaaaatattttttaaaaaaaagatatactgtggaaggggggagaatcccataactaactgctgaggagggacctgctttggggagtaggggaaggcccagggagtggggcagggggctgcttattcactctggggattcgccatggacacgtctcaactgcgcaagctgcttgcccatgtttccctgcccccttcacccccttgggcctgctcaagggtaggtgggcgtgggtggtaggagggttttttttacccagggctctggaaggacaccaaactgttctgcttgttaccttccctcccgtcttctcctcgcctttcacagtcccctcctgcctgctcctgtccagccaggtctaccacccaccccacccctctttctccggctccctgcccctccagattgcctggtgatctattttgtttccttttgtgtttctttttctgttttgagtgtctttctttgcaggtttctgtagccggaagatctccgttccgctcccagcggctccagtgtaaattccccttccccctggggaaatgcactaccttgttttggggggtttaggggtgtttttgtttttcagttgttttgtttttttgttttttttttttcctttgccttttttcccttttatttggagggaatgggaggaagtgggaacagggaggtgggaggtggattttgtttatttttttagctcatttccaggggtgggaatttttttttaatatgtgtcatgaataaagttgtttttgaaaat

SEQ ID NO: 2 - DNA, 2658 bp, Homo sapiens
cgcagaggcaccgccccaagtttgttgtgaccggcgggggacgccggtggtggcggcagcggcggctgcgggggcaccgggccgcggcgccaccatggcggtgcgacaggcgctgggccgcggcctgcagctgggtcgagcgctgctgctgcgcttcacgggcaagcccggccgggcctacggcttggggcggccgggcccggcggcgggctgtgtccgcggggagcgtccaggctgggccgcaggaccgggcgcggagcctcgcagggtcgggctcgggctccctaaccgtctccgcttcttccgccagtcggtggccgggctggcggcgcggttgcagcggcagttcgtggtgcgggcctggggctgcgcgggcccttgcggccgggcagtctttctggccttcgggctagggctgggcctcatcgaggaaaaacaggcggagagccggcgggcggtctcggcctgtcaggagatccaggcaatttttacccagaaaagcaagccggggcctgacccgttggacacgagacgcttgcagggctttcggctggaggagtatctgatagggcagtccattggtaagggctgcagtgctgctgtgtatgaagccaccatgcctacattgccccagaacctggaggtgacaaagagcaccgggttgcttccagggagaggcccaggtaccagtgcaccaggagaagggcaggagcgagctccgggggcccctgccttccccttggccatcaagatgatgtggaacatctcggcaggttcctccagcgaagccatcttgaacacaatgagccaggagctggtcccagcgagccgagtggccttggctggggagtatggagcagtcacttacagaaaatccaagagaggtcccaagcaactagcccctcaccccaacatcatccgggttctccgcgccttcacctcttccgtgccgctgctgccaggggccctggtcgactaccctgatgtgctgccctcacgcctccaccctgaaggcctgggccatggccggacgctgttcctcgttatgaagaactatccctgtaccctgcgccagtacctttgtgtgaacacacccagcccccgcctcgccgccatgatgctgctgcagctgctggaaggcgtggaccatctggttcaacagggcatcgcgcacagagacctgaaatccgacaacatccttgtggagctggacccagacggctgcccctggctggtgatcgcagattttggctgctgcctggctgatgagagcatcggcctgcagttgcccttcagcagctggtacgtggatcggggcggaaacggctgtctgatggccccagaggtgtccacggcccgtcctggccccagggcagtgattgactacagcaaggctgatgcctgggcagtgggagccatcgcctatgaaatcttcgggcttgtcaatcccttctacggccagggcaaggcccaccttgaaagccgcagctaccaagaggctcagctacctgcactgcccgagtcagtgcctccagacgtgagacagttggtgagggcactgctccagcgagaggccagcaagagaccatctgcccgagtagccgcaaatgtgcttcatctaagcctctggggtgaacatattctagccctgaagaatctgaagttagacaagatggttggctggctcctccaacaatcggccgccactttgttggccaacaggctcacagagaagtgttgtgtggaaacaaaaatgaagatgctctttctggctaacctggagtgtgaaacgctctgccaggcagccctcctcctctgctcatggagggcagccctgtgatgtccctgcatggagctggtgaattactaaaagaacttggcatcctctgtgtcgtgatggtctgtgaatggtgagggtgggagtcaggagacaagacagcgcagagagggctggttagccggaaaaggcctcgggcttggcaaatggaagaacttgagtgagagttcagtctgcagtcctgtgctcacagacatctgaaaagtgaatggccaagctggtctagtagatgaggctggactgaggaggggtaggcctgcatccacagagaggatccaggccaaggcactggctgtcagtggcagagtttggctgtgacctttgcccctaacacgaggaactcgtttgaagggggcagcgtagcatgtctgatttgccacctggatgaaggcagacatcaacatgggtcagcacgttcagttacgggagtgggaaattacatgaggcctgggcctctgcgttcccaagctgtgcgttctggaccagctactgaattattaatctcacttagcgaaagtgacggatgagcagtaagtaagtaagtgtggggatttaaacttgagggtttccctcctgactagcctctcttacaggaattgtgaaatattaaatgcaaatttacaactgcagatgacgtatgtgccttgaactgaatatttggctttaagaatgattcttatactctgaaggtgagaatattttgtgggcaggtatcaacattggggaagagatttcatgtctaactaactaactttatacatgatttttaggaagctatgcctaaatcagcgtcaacatgcagtaaaggttgtcttcaactg

SEQ ID NO: 3 - DNA, 604 bp, Homo sapiens
atgcattctgcaagccaccctggggtgcagctgagctagacatgggacggcgagacgcccagctcctggcagcgctcctcgtcctggggctatgtgccctggcggggagtgagaaaccctccccctgccagtgctccaggctgagcccccataacaggacgaactgcggcttccctggaatcaccagtgaccagtgttttgacaatggatgctgtttcgactccagtgtcactggggtcccctggtgtttccaccccctcccaaagcaagagtcggatcagtgcgtcatggaggtctcagaccgaagaaactgtggctacccgggcatcagccccgaggaatgcgcctctcggaagtgctgcttctccaacttcatctttgaagtgccctggtgcttcttcccgaagtctgtggaagactgccattactaagagaggctggttccagaggatgcatctggctcaccgggtgttccgaaaccaaagaagaaacttcgccttatcagcttcatacttcatgaaatcctgggttttcttaaccatcttttcctcattttcaatggtttaacatataatttctttaaataaaacccttaaaatctgct

SEQ ID NO: 4 - DNA, 2977 bp, Homo sapiens
gggagagtcggaagcgcggcggccgcggagccctgcgagtaggcagcgttgggcccatgcaggacgcggagaacgtggcggtgcccgaggcggccgaggagcgcgccgagcccggccagcagcagccggccgccgagccgccgccagccgaggggctgctgcggcccgcggggcccggcgctccggaggccgcggggaccgaggcctccagtgaggaggtggggatcgcggaggccgggccggagtccgaggtgaggaccgagccggcggccgaggcagaggcggcctccggcccgtccgagtcgccctcgccgccggccgccgaggagctgcccgggtcgcatgctgagccccctgtcccggcacagggcgaggccccaggagagcaggctcgggacgagcgctccgacagccgggcccaggcggtgtccgaggacgcgggaggaaacgagggcagagcggccgaggccgaaccccgggcgctggagaacggcgacgcggacgagccctccttcagcgaccccgaggacttcgtggacgacgtgagcgaggaagaattactgggagatgtactcaaagatcggccccaggaagcagatggaatcgattcggtgattgtagtggacaatgtccctcaggtgggacccgaccgacttgagaaactcaaaaatgtcatccacaagatcttttccaagtttgggaaaatcacaaatgatttttatcctgaagaggatgggaagacaaaagggtatattttcctggagtacgcgtcccctgcccacgctgtggatgctgtgaagaacgccgacggctacaagcttgacaagcagcacacattccgggtcaacctctttacggattttgacaagtatatgacgatcagtgacgagtgggatattccagagaaacagcctttcaaagacctggggaacttacgttactggcttgaagaggcagaatgcagagatcagtacagtgtgatttttgagagtggagaccgcacttccatattctggaatgacgtaaaagaccctgtctcaattgaagaaagagcgagatggacagagacgtatgtgcgttggtctcctaagggcacctacctggctacctttcatcaaagaggcattgctctatgggggggagagaaattcaagcaaattcagagattcagccaccaaggggttcagcttattgacttctcaccttgtgaaaggtacctggtgacctttagccccctgatggacacgcaggatgaccctcaggccataatcatctgggacatccttacggggcacaagaagaggggttttcactgtgagagctcagcccattggcctatttttaagtggagccatgatggcaaattctttgccagaatgaccctggatacgcttagcatctatgaaactccttctatgggtcttttggacaagaagagtttgaagatctctgggataaaagacttttcttggtctcctggtggtaacataatcgccttctgggtgcctgaagacaaagatattccagccagggtaaccctgatgcagctccctaccaggcaagagatccgagtgaggaacctgttcaatgtggtggactgcaagctccattggcagaagaacggagactacttgtgtgtgaaagtagataggactccgaaaggcacccagggtgttgtcacaaattttgaaattttccgaatgagggagaaacaggtacctgtggatgtggtcgagatgaaagaaaccatcatagcctttgcctgggaaccaaatggaagtaagtttgctgtgctgcacggagaggctccgcggatatctgtgtctttctaccacgtcaaaaacaacgggaagattgaactcatcaagatgttcgacaagcagcaggcgaacaccatcttctggagcccccaaggacagttcgtggtgttggcgggcctgaggagtatgaacggtgccttagcgtttgtggacacttcggactgcacggtcatgaacatcgcagagcactacatggcttccgacgtcgaatgggatcctactgggcgctacgtcgtcacctctgtgtcctggtggagccataaggtggacaacgcgtactggctgtggactttccagggacgcctcctgcagaagaacaacaaggaccgcttctgccagctgctgtggcggccccggcctcccacactcctgagccaggaacagatcaagcaaattaaaaaggatctgaagaaatactctaagatctttgaacagaaggatcgtttgagtcagtccaaagcctcaaaggaattggtggagagaaggcgcaccatgatggaagatttccggaagtaccggaaaatggcccaggagctctatatggagcagaaaaacgagcgcctggagttgcgaggaggggtggacactgacgagctggacagcaacgtggacgactgggaagaggagaccattgagttcttcgtcactgaagaaatcattcccctcgggaatcaggagtgacctggagcactgtgcgcagccgtgtgtgctgtggagccgaggccgtcctgcaggaagccgcgtgactcccgcctcctccctgtgctctctggctctggactgtgactgcgcctggattctgccattgcgacacatttttgtgcctttcagcccctggtgtctgcagtgggggatttaaggcacccgcttccacttctttcttgtttggagttttctgttggaaccgccggcgttggctccgaagacttagcgacgccactggcggcaccttctcctgcgcccagtgatgtttccacggtgcctgtacacagccgagcagcatttccgttgaaggacttgcatccccattgcgggcagtgctggacgtgtcccggagacccaccgggagggcgccgccatgccttgtacccccaccgtgcaggttgtggccggttttctccgcaggttgaacatggaaataaaagcaaacttgtatg

SEQ ID NO: 5 - DNA, 2002 bp, Homo sapiens
ggtggttcttgcccgtgttgtgtgtgtgtgtgagtgagagagcgagtgagtgagtgagtgagtgtgtgtgtgggggggactcggcttgttgttgtcggtgacttccccctccccttcaccccttcccctccccgccgccgctgcagtggccgctccctgggccgtaggaaatgagcgataacgatgacatcgaggtggagagcgacgaagagcaaccgaggtttcaatctgcggctgacaaacgggctcatcataatgcactggaacgaaaacgtagggaccacatcaaagacagctttcacagtttgcgggactcagtcccatcactccaaggagagaaggcatcccgggcccaaatcctagacaaagccacagaatatatccagtatatgcgaaggaaaaaccacacacaccagcaagatattgacgacctcaagcggcagaatgctcttctggagcagcaagtccgtgcactggagaaggcgaggtcaagtgcccaactgcagaccaactacccctcctcagacaacagcctctacaccaacgccaagggcagcaccatctctgccttcgatgggggctcggactccagctcggagtctgagcctgaagagccccaaagcaggaagaagctccggatggaggccagctaagccactcggggcaggccagcaataaaaactgtctgtctccatcgtctcatcctcctttcagttcgttggtagagccctcagaaccatttaagagactctttatttttctctttctcccttttttttttaaatttttatttttacgtagaagctcttggacaacagctctcgttctccttccccatttccactgtatattttttaatgtattcccttcagggattccctgtccccaacaggaatttttaaaccaaaacaccccaacttggcagctttttctgtggaggacagacggccggccggacctctgagcacatagtgtcctgcccaccctaccagctcctccagccctgccgggcacatgcccgggggacgcctgccctgcccaggtggcctcctggcccgccctcacctctgatagactttgtgaatctgaactgctctactttgagaagatgaccggtttggagtaatcagaatgaaccctcctcctttttaagggttttttttttttcctttttctaaaaagctatgtatcgctcctattgaaagaccagatccttagagaagtttgtggtataaaaaggaagtggggacagattcgcagcacagagtcgctggcatgtttcactcctgcttctctcagccagctgtttaagcctgcggcgccagcctcacggagggccgtgtgacactctcgtggtatgtatgggagatggcagcagtgaagcagcagccaccagggagtggccatttggggttgggacagggagggtgttttgggtggcatagaggttttgtattgagggccagtgatgatgttttgatatttatttcctgctacttaaatttgaatctgagtgaattgtacctatttctgatgatgtcggtcttgcaaagcgacagattcataaagtaatgatgaaatctttctttcttcccgtgtgtatttctaagaaatagagccaactgattttgtatgtaaataccaagagcaatttacctggtactaaacccgcaccccagtgcggacccttcccagccctcatcccacttcctttcctactgtcctggaacctgtctccattgtgtgatccagccctggttctggctgtggtcagcagatgccagtgaagggttttgtgtgtttaggcctcatttctttgtctttttcctactccgttcctggcatttgctgatttctagtgtatactctgtagtctcagttcgtgtttgattccattccatggaaataaaaagtatgttgtacatactgccgaagaattgtcttgcaagttaaggcttccccctttactataagactataaataaaaacttattttatcctt

SEQ ID NO: 6 - DNA, 8469 bp, Homo sapiens
atggcggcggcggcgggcggcggcagttgccccgggcctggctccgcgcggggccgcttcccgggccggccgcggggcgccggcgggggcgggggccgcggcggacggggcaacggggccgaaagagtgcgggtagctctgcggcgcggcggtggcgcgacggggccgggcggagccgagcccggggaggacacggccctgctccgtttgctggggctccgccggggcctgcgccggctccgccgcctgtgggccggcccgcgggtccagcggggccggggacggggtcggggccggggctggggcccgagtcgaggctgcgtgccggaggaggagagcagtgacggggaatccgacgaggaggagtttcagggttttcattcagatgaagatgtggcccccagttccctgcgctctgcgctccgatcccagcgaggtcgagcgccccgaggtcggggtcgcaagcataagacgaccccccttcctcctcctcgcctagcagatgtggctcctacccccccaaagacccctgcccggaaacggggtgaggaaggcacagaacggatggtgcaggcactgactgaacttctccggcgggcccaggcaccccaagcaccccggagccgggcatgtgagccctccaccccccggcggtctcggggacggcccccaggacggccagcaggcccctgcaggaggaagcagcaagcagtagtggtggcagaagcagctgtgacaatccccaaacctgagcccccacctcctgtggttccagtgaaacatcagactggcagctggaaatgcaaggaggggcccggtccaggacctgggacccccaggcgtggaggacagtcaagccgtggaggccgtggaggcaggggccgcggccgaggtggtgggctcccctttgtgatcaagtttgtttcaagggccaaaaaagtaaagatgggacaattgtccttgggactcgaatcaggtcaaggtcaaggtcaacatgaggaaagttggcaggatgtcccccaaagaagagttggatctggacagggagggagcccttgctggaaaaagcaggaacagaagctggatgacgaggaagaagagaagaaagaagaagaagaaaaagacaaggagggagaagagaaggaagaaagagctgtagctgaggagatgatgccagctgcggaaaaggaagaggcaaagctgccaccaccgcctctgactcctccagccccttcacctcctccacccctcccacccccttcgacatctcctccacccccactctgccctccaccaccacccccagtgtccccaccacctctaccatcccctccaccgcctcctgcccaagaggagcaggaggaatcccctcctcctgtggtcccagctacgtgctccaggaagaggggccggcctcccctgactcccagccagcgggcggagcgggaagctgctcgggcagggccagagggcacctctcctcccactccaacccccagcaccgccacgggaggccctccggaagacagtcccaccgtggcccccaaaagcaccaccttcctgaagaatatccggcagtttattatgcctgtggtgagtgcccgctcctcccgtgtcatcaagacaccccggcgatttatggatgaagacccccccaaacccccaaaggtggaggtctcacctgtcctgcgacctcccattaccacctccccacctgttccccaggagccagcaccagtcccctctccaccacgtgccccaactcctccatctaccccagttccactccctgagaagagacggtccatcctaagggaacccacatttcgctggacctcactgacccgggagctgccccctcctcccccagcccctccacctcccccggccccctccccaccccctgctcctgccacctcctcccggaggcccctactccttcgggcccctcagtttaccccaagcgaagcccacctgaagatctacgaatcggtgcttactcctcctcctcttggggctcctgaagcccctgagccagagcctcctcctgccgatgactctccagctgagcctgagcctcgggcagtgggccgcaccaaccacctcagcctgcctcgattcgcccctgtggtcaccactcctgttaaggccgaggtgtcccctcacggggctccagctctgagcaacgggccacagacacaggctcagctactgcagcccctgcaggccttgcaaacccagctcctgccccaggcactaccgccaccacagccacagctgcagccaccgccgtcaccacagcagatgcctcccctggaaaaagcccggattgcgggcgtgggttccttgccgctgtctggggtagaggagaagatgttcagcctcctcaagagagccaaagtgcagctattcaagatcgatcagcagcagcagcagaaggtggcagcttccatgccgctgagccctggagggcagatggaggaggtggccggggctgtcaagcagatctccgacagaggccctgtccggtctgaagatgagtcggtggaagctaagagagagcggccctcaggtcccgagtcccctgtgcaaggtccccgcatcaaacatgtctgccgtcatgctgctgtggccctgggtcaggcccgggccatggtgcctgaagatgtccctcgcctcagtgccctccctctccgggatcggcaggacctcgccacagaggatacatcatcggcgtccgagactgagagtgtcccgtcacggtcccggcggggaaaggtggaggcagcaggccctgggggagaatcagagcccacaggttctggagggaccctggcccacacaccccggcgctcactgccctcccatcacggcaagaagatgcgcatggctcgatgtggacactgtcggggctgcctacgtgtgcaggactgtgggtcctgtgtcaactgcctagacaagcccaagtttgggggccctaacaccaagaagcagtgctgtgtataccggaagtgtgacaaaatagaggctcggaagatggaacgactggctaaaaaaggccggacgatagtgaagacgctgttgccctgggattccgatgaatctcctgaggcctcccctggtcctccaggcccacgccggggggcgggagctggggggccccgggaggaggtggtggcccacccagggcccgaggagcaggactccctcctgcagcgcaagtcagctcggcgctgcgtcaaacagcgaccctcctatgatatcttcgaggattcggatgactcggagcccgggggcccccctgctcctcggcgtcggaccccccgagaaaatgagctgccactgccagaacctgaggagcagagccggccccgcaaacctaccctgcagcctgtgttgcagctcaaggcccgaaggcgcctggacaaggatgctttggcccctggcccctttgcttcttttcccaatggctggactggaaagcagaagtctcccgatggtgtgcaccgcgtccgtgtggattttaaggaggattgtgatttagagaacgtgtggctgatggggggcctgagtgtgctcacctctgtgccagggggccccccgatggtgtgcttgctgtgtgccagcaaaggactccacgagctggtgttctgtcaagtctgctgtgacccattccacccattctgcctggaggaggccgagcggcccctgccccagcatcacgacacctggtgctgccgtcgctgcaaattctgccacgtctgtggacgcaaaggtcgtggatccaagcacctcctggagtgcgagcgctgccgccatgcataccacccggcctgtctggggcccagctatccaacccgggccacgcgcaaacggcgccactggatctgttcagcctgtgtgcgctgtaagagctgtggggcaactccaggcaagaactgggacgtcgagtggtctggagattacagcctctgccccaggtgcacccagctatatgagaaaggaaactactgcccgatctgtacacgctgctatgaagacaacgactatgagagcaagatgatgcagtgcgcacagtgcgatcactgggtgcatgccaagtgcgaggggctctcagatgaagactacgagatcctttcaggactgccagactcggtgctgtacacctgcggaccgtgtgctggggcagcgcagccccgctggcgagaggccctgagcggggccctccaggggggcctgcgccaggtgctccagggcctgctgagctccaaggtggtgggcccactgctgctctgcacccagtgtgggccagatgggaagcaactgcacccaggaccctgcggcctgcaagctgtgagtcagcgcttcgaggatggccactacaagtctgtgcacagcttcatggaggacatggtgggcatcctcatgcggcactcggaggagggagagaccccggaccgccgggctggaggccagatgaaggggctcctgctgaagctgctagaatctgcgttcggctggttcgacgcccacgaccccaagtactggcgacggagtacccggctgccaaacggagtccttcccaatgcggtgttgcccccatccctggatcatgtctatgcgcagtggagacagcaggaaccagagaccccagaatcagggcagcctccaggggatccctcagcagcattccagggcaaggatccggctgccttctcacacctggaggacccccgtcagtgtgcactctgcctcaaatacggggatgcagactccaaggaggcggggcggctcttgtacatcgggcagaacgagtggacacacgtcaactgtgccatctggtcggcggaagtcttcgaggagaacgacggctccctcaagaatgtgcatgctgctgtggcccgagggaggcagatgcgctgcgagctctgcctgaagcctggcgccacggtgggctgctgcctgtcctcctgcctcagcaacttccacttcatgtgtgcccgggccagctactgcatcttccaggatgacaagaaagtcttctgccagaaacacactgatctcctggatggcaaggaaattgtgaaccccgatggttttgatgttctccgccgagtctatgtggacttcgagggcatcaacttcaagcggaagttcttgacggggcttgaacccgatgccatcaacgtgctcattggttccatccgcattgactccctgggtactctgtctgatctctcggactgcgagggacggctcttccccattggctaccagtgctcccgtctgtactggagcacagtggatgctcggaggcgctgctggtatcggtgccgaattctggagtatcggccatgggggccgagggaagagccagctcacctggaggctgcagaggagaaccagaccattgtgcacagccccgccccttcctcagagcccccaggtggtgaggaccccccactggacacagatgttcttgtccctggagctcctgagcgccactcgcccattcagaacctggaccctccactgcggccagattcaggcagcgcccctcctccagccccccgttctttttcgggggctcgaatcaaagtgcccaactactcgccatcccggaggcccttggggggtgtctcctttggccccctgccctcccctggaagtccatcttcactgacccaccacatccccacagtgggagacccggacttcccagctccccccagacgttcccgtcgtcccagccctttggctcccaggccgcctccatcacggtgggcctcccctcctctaaaaacctcccctcagctcagggtgccccctcctacctcagtcgtcacagccctcacacctacctcaggggagctggctccccctggcccggccccatctccaccaccccctgaagacctgggcccagacttcgaggacatggaggtggtgtcaggactgagtgctgctgacctggacttcgcggccagcctgctggggactgagcccttccaggaagagattgtagccgctggggccatggggagcagccacgggggcccgggggacagctccgaggaggagtccagccccacctcccgctacatccacttccctgtgactgtggtgtccgcccctggtctggcccccagcgctacccctggagccccccgcattgaacagctggacggcgtggacgacggcactgacagtgaggctgaggcggtgcagcagcctcggggccagggcacgcctccttcggggccaggagtagtccgggcaggggtccttggggctgcaggggacagggcccggcctcctgaggacctgccatcggaaattgtggattttgtgttgaagaacctagggggtcctggggatggaggtgctggccctagagaggagtcactccccccggcgcctcccctggctaatggcagccagccctcccaaggcctgaccgccagcccagctgaccccacccgcacatttgcctggctcccaggggccccaggggtccgggtgttaagccttggccctgcccctgagccccccaaacccgccacatccaaaatcatacttgtcaacaagctggggcaagtatttgtgaagatggctggggagggtgaacctgtcccacccccagtgaagcagccacctttgccccccaccatttcccccacggctcccacctcctggactctgcccccaggccccctcctcggcgtgctgcccgtggtcggagtggtccgccctgccccgcccccgccaccccctcccctgacgctggtgctgagcagtgggccagccagcccgccccgccaggccatccgcgtcaagagggtgtccactttctccggccggtccccgccagcacctcccccatacaaagccccccggctggatgaagatggagaggcctcagaggatacccctcaggttccagggcttggcagtggcgggtttagccgtgtgaggatgaaaacccccacagtgcgtggggtccttgacctggatcggcctggggagcccgctggggaagaaagtcctgggcccctccaggaacggtcccctttgctgccacttccggaagatggtcctccccaggtccccgatggtcccccagacctgctgcttgagtcccagtggcaccactattcaggtgaggcttcgagctctgaggaagagcctccatccccagatgataaagagaaccaggccccaaaacggactggcccacatctgcgcttcgagatcagcagtgaggatgggttcagcgttgaggcagagagcttggagggggcgtggagaactctgatcgagaaagtgcaagaggcccgagggcatgcccgactcagacatctctcctttagtggaatgagtggggcgagactcctgggcatccaccatgatgctgtcatcttcctggccgagcagctccccggagcccagcgttgccagcactataagttccgttaccaccagcagggagagggccaggaggagccgcccctgaatccccatggggctgctcgggcagaggtctatctccggaagtgcacctttgacatgttcaacttcctggcctcccagcaccgggtgctccctgagggggccacctgtgatgaggaagaggatgaggtgcagctcaggtcaaccagacgtgccaccagcctggagctgcccatggccatgcgttttcgtcaccttaagaagacgtccaaagaagctgtgggtgtctacagatcagccatccacgggcgaggcctgttctgtaagcgcaacatcgacgcgggggagatggtcatcgagtactctggcattgtcatccgctcggtgttgactgacaagcgggagaagttctacgatgggaagggcatcgggtgctatatgttccgcatggatgactttgatgtagtggacgccacgatgcatggcaatgccgcccgcttcatcaaccactcctgtgagcccaactgcttctctcgggtcatccacgtggagggccagaaacacattgttatcttcgccctgcgccgcatcctgcgtggtgaggagctcacctacgactacaagttccccatcgaggatgccagcaacaagctgccctgcaactgtggcgccaagcgctgccgtcggttccttaactgaggccgtggctgcccaccacgacccctcacacctcctgctgccgtcgctgccatcttgcccctagcctgggggctccctagcccctcccagagcatctcacccccaccctcatgttcagggtggatgtgggcatgcaggtgacaagggccctgcctccacccctccagcccatccagcaatcgccccctttctgccctgggggcccaggatgtagatattgtacaaaggtttctaaatcccttcttttctatgcacttttttatttaagaggtggggtcccaggtgggaacccccccacaataaagtctgtcaatgtttgga

SEQ ID NO: 7 - DNA, 3704 bp, Homo sapiens
cagcagcgtgctaagaagcagtcacataaacagcagcaggagtaggcctcctgcttttcaaaagcagagtactgcagggtcgcgaaatgcaagacactcagatgtttgaaaatctcccgagttgagaatggctactgtaaaagcgtcaccaagaaactctgacgatctggacagtcctaactctgtgttagcaatacttacttccggaaaattaatgctacttcttgtagatttttgcaaataggaaacccccttgaagaagatctcaaattacgccccccacccccaaaaaaagacaaacaggggagaacaaagttttggcatgcctgcaggaacggtggcttttttagaaactacctaggaggcagaagctaagtgatttgctcatgcctcttacctgggagtagaaggtgggaagaaatggaccgaggctgtgacgagaagacaaggcacagtgcagcttggtgaagccacacgctgactgcgttctgccccctcttcatgcagtgctgcgggctggtgcatcgccggcgagtacgggtgtcctatggttcggcagactcctacactagccgtccatccgattccgatgtatctctggaggaggaccgggaggcagtgcgcagagaagcggagcggcaggcccaggcacagttggaaaaagcaaagacaaagcccgttgcatttgcggttcggacaaatgtcagctacagtgcggcccatgaagatgatgttccagtgcctggcatggccatctcattcgaagcaaaagattttctgcatgttaaggaaaaatttaacaatgactggtggatagggcgattggtaaaagaaggctgtgaaatcggattcattccaagcccagtcaaactagaaaacatgaggctgcagcatgaacagagagccaagcaagggaaattctactccagtaaatcaggaggaaattcatcatccagtttgggtgacatagtacctagttccagaaaatcaacacctccatcatctgctatagacatagatgctactggcttagatgcagaagaaaatgatattccagcaaaccaccgctcccctaaacccagtgcaaacagtgtaacgtcaccccactccaaagagaaaagaatgcccttctttaagaagacagagcacactcctccgtatgatgtggtaccttccatgcgaccagtggtcctagtgggcccttctctgaagggctacgaggtcacagatatgatgcaaaaagcgctgtttgattttttaaaacacagatttgaagggcggatatccatcacaagggtcaccgctgacatctcgcttgccaaacgctcggtattaaacaatcccagtaagcacgcaataatagaaagatccaacacaaggtcaagcttagcggaagttcagagtgaaatcgaaaggatttttgaacttgcaagaacattgcagttggtggtccttgacgcggatacaattaatcatccagctcaactcagtaaaacctccttggcccctattatagtatatgtaaagatttcttctcctaaggttttacaaaggttaataaaatctcgagggaaatctcaagctaaacacctcaacgtccagatggtagcagctgataaactggctcagtgtcctccagagctgttcgatgtgatcttggatgagaaccagcttgaggatgcctgtgagcaccttgccgactatctggaggcctactggaaggccacccatcctcccagcagtagcctccccaaccctctccttagccgtacattagccacttcaagtctgcctcttagccccaccctagcctctaattcacagggttctcaaggtgatcagaggactgatcgctccgctcctatccgttctgcttcccaagctgaagaagaacctagtgtggaaccagtcaagaaatcccagcaccgctcttcctcctcagccccacaccacaaccatcgcagtgggacaagtcgcggcctctccaggcaagagacatttgactcggaaacccaggagagtcgagactctgcctacgtagagccaaaggaagattattcccatgaccacgtggaccactatgcctcacaccgtgaccacaaccacagagacgagacccacgggagcagtgaccacagacacagggagtcccggcaccgttcccgggacgtggatcgagagcaggaccacaacgagtgcaacaagcagcgcagccgtcataaatccaaggatcgctactgtgaaaaggatggagaagtgatatcaaaaaaacggaatgaggctggggagtggaacagggatgtttacatcccccaatgagttttgcccttttgtgtttttttttttttttttttgaagtcttgtataactaacagcatccccaaaacaaagtctttggggtctacactgcaatcatatgtgatctgtcttgtaatattttgtattattgctgttgcttgaatagcaatagcatggatagagtattgagatactttttcttttgtaagtgctacataaattggcctggtatggctgcagtcctccggttgcatactggactcttcaaaaactgttttgggtagctgccacttgaacaaaatctgttgccacccaggtgatgttagtgttttaagaaatgtagttgatgtatccaacaagccagaatcagcacagataaaaagtggaatttcttgtttctccagatttttaatacgttaatacgcaggcatctgatttgcatattcattcatggaccactgtttcttgcttgtacctctggctgactaaatttggggacagattcagtcttgccttacacaaaggggatcataaagttagaatctattttctatgtactagtactgtgtactgtatagacagtttgtaaatgttatttctgcaaacaaacacctccttattatatataatatatatatatatatcagtttgatcacactattttagagtcttaatgccaagtcagcagatttgctttatgaattacagggactagaaatgcccacattcaggaaatttgtaataacattgtctagacacctatcctcattctagtagaaagtgtgtacatactgtaaatatgtgtgattgcttgacttgaaaaggtttgaattctgaatgttataccatccttgtaagtaagtttgtaatttccaccataaattatggtaaatataaaactccagaggttgttctactccatacagttcacactgattgtgacacattcttagtagctagtgtctgttctagtcactgcactggagtctacgagccggaactcgctatatgcacgtgtgtgtgtccgtatgtaagaaagtgtgcaccgagtgactgaatggttgagatgaattggaatgctgaagactaacgaagaaactagagactgatatcgagcattctgcccacctcgctctgtatttaattaattgtgctatatgttgctttaacaacccattgagcagtcagggaatgtgagtaagcttgctgccaaaggtaactaggaaagcattcatctgctgcctccttgtttttgctcctagagagtgaaaatacaggcaattttactgtgagtgtttcactggaaatgtacaatctttgtgtgttagagtatttgttttagtaagaaatgtttacacagcttgtggaattatttcgtgggaaaataaatttttataacttctccc

SEQ ID NO: 8 - DNA, 4184 bp, Homo sapiens
ccggggctgagctgcggcggcgcctgacaatgccccctcgcgccccggcctcggcgcccgctcccggctccagcgcgcctgcacgtacgtagccttcacgtgtgtgtggatacggagtgcatgtgtggagacagaggaatatgctccaacaaatttcggatagaggcgccgaagacaggacgtggggaagctaaagaagtaaacaggtcatggcacgtttaacaaaaagacgacaggcggatacaaaagctatccagcatctttgggcagccattgagattatacggaaccagaagcagattgccaacattgaccgtattacaaagtatatgtctcgagtccacggtatgcaccctaaagagaccacccgtcagctgagcttagctgtgaaagatggtcttattgtcgaaactctaacagtgggctgcaaaggttcaaaagctggtattgaacaagaaggatattggttgccaggagatgagattgactgggaaacagaaaatcatgactggtattgttttgaatgccatttgcctggagaggtgttgatatgtgacctgtgttttcgtgtgtatcattccaagtgtttgtctgatgagttcaggcttagagacagcagtagtccctggcagtgcccagtttgcaggagcattaagaagaagaatacaaacaaacaggagatgggcacatacctcagattcattgtctcccgcatgaaggagagggctatagatcttaataaaaaggggaaggacaataaacacccgatgtacaggaggctggtgcactcagctgtggacgttcccaccattcaagagaaagtgaatgaagggaaataccgaagttatgaagagttcaaagctgatgcccaattgcttctccacaataccgtgattttctatggagcagacagtgagcaagctgacattgcgaggatgctatataaagacacatgtcatgagctggatgaactgcagctttgcaagaattgcttttacttgtcaaatgctcgtcctgacaactggttctgttatccttgtatacctaatcatgagctggtttgggctaaaatgaaaggttttgggttttggccagccaaagtcatgcagaaagaagacaatcaagtcgacgttcgcttctttggccaccaccaccagagggcctggattccttctgaaaacattcaagatatcacagtcaacattcatcggctgcacgtgaagcgcagtatgggttggaaaaaggcctgtgatgagctggagctgcatcagcgtttcctacgagaagggagattttggaaatctaagaatgaggaccgaggtgaggaagaggcagaatccagtatctcctccaccagtaatgagcagctaaaggtcactcaagaaccaagagcaaagaaaggacgacgtaatcaaagtgtggagcccaaaaaggaagaaccagagcctgaaacagaagcagtaagttctagccaggaaatacccacgatgcctcagcccatcgaaaaagtctccgtgtcaactcagacaaagaagttaagtgcctcttcaccaagaatgctgcatcggagcacccagaccacaaacgacggcgtgtgtcagagcatgtgccatgacaaatacaccaagatcttcaatgacttcaaagaccggatgaagtcggaccacaagcgggagacagagcgtgttgtccgagaagctctggagaagctgcgttctgaaatggaagaagaaaagagacaagctgtaaataaagctgtagccaacatgcagggtgagatggacagaaaatgtaagcaagtaaaggaaaagtgtaaggaagaatttgtagaagaaatcaagaagctggcaacacagcacaagcaactgatttctcagaccaagaagaagcagtggtgctacaactgtgaggaggaggccatgtaccactgctgctggaacacatcctactgctccatcaagtgccagcaggagcactggcacgcggagcacaagcgcacctgccgccggaaaagatgaagctggcccttcccggagtcaccccgatgattactcttttcagacacagcggtttttgtttccaagaagccaaaattgtttagaatttgcttcccattttgcaccagcctttaaacacttttcgtgaagaaattttgcacagtagtttaaatcttttgttaatgctcctccgaagtttttcagggggtaaaagtaacatcagtggagggtattattttaaataaattttaattgagaatttgttgcattttcagcaaattttaaaacatttttaggttttacagagattttaacctttaaacaacagatctttaaaaaacaggtgaatacaagtgagtttaacaaagaaacatttagaatagatctgaatgtaagaactacagaactgtttcagaaataaaacatactaccttgatgtgacatttttttcttaaccttgttgagctggttttgttcagcttaatttactgttcaaaggcattatctgttggtcacaccagtgggtatatgattgaatttagggaacagggttgacacagcagggctagtcctgcatattttttcttaaatatttcccaattgtgtttttcattatttcttttcaatatataacttttataacaaattattagctttgatcttgtagtttaaaattgcagggaactggggtaatcttttactgagctggatcttagagaaaatgaatatttaaattttaaagtttgcacatttcatctttgtcctaacatgagtgcttgtaacaaaataaacaacaaaaacaaagccaaaaactacctttatccatatgtgaaattatagatgaggcatacgaatttgtttaatgcttcccttcccttcccacatatcatctcactgcctattatctggtgtcacctcatgtatcgtaagttaatactaaaagaagagaaagcacttaagtttcacagaagccgttatgtttgtagtaatgggtcattgcctactaatgaactccatcactgtacacagaatgaagaataatgcatgttaattttcttgtattaaagatgccgtgatttgtaaaaagtctgtattttgcggaatgtctggattaagaagcattaccaataggaatggatcgatagttgaataatgattttttatacatagatatataaaatacagccaggaaaacttaaattacttttcttttaaaatatctcacaatttatgtggtatttttaaagactgatcttagaccaagtcaaattcccatttatcatttagttattttttgaggttagagaataatttgtacatatttatttagacctttgatatttattaaagcaattactcacaatggaagtgaaagaatcaggagaaaagccttttaaaaagtattctccaggtttgtcagggtcactctaaagataaaaatgtaactaagtcttctgtgaaatatcatccatctaatcttgatgctgttgcagatggtggtgacacaagttaattgacaaactactgccaaatggtgcacaatattttgtaaaaagtacccagtagccccatttcatacaatgtacctaaattatgcagtaacttggcatcatcgttccctccttgttgctgtgtaattagtcagtgttgccacagtgtgtggcgctgatggagatgtcagaaccgagaacacttaaccttctttgattgtttttcaagttttaagacttcgatccacccctatgagagcaagtaattgtggaaatatttttggtgtaaaatcattccagagtatgtaatatttaactgatagctgcatgaaagtgagattcgtgttactttggcttttctgtctctgttgacacggttgcacatttccaagttactacagcgtgaaaactgtgtgtttaaaaaaaaacaaaattaaaaaaagagattgtggcctggttttgtaaaagttttaggtaaaattacaattgattgttttaggaatcattattaaaaattttctgcaaatcataaagctatatcgaggtgttgagcttagccactatgcacattgtaattattcattgtggctgtccagttctatgatgcattctggcattttgtaagctgctctgactagcaatatatagattcatttaatgtgttaacattggttaataaatgtatttaaaaaaaact

SEQ ID NO: 9 - DNA, 6714 bp, Homo sapiens
ccctaggcccgggtcccggatccccgcgcacccggccaggctctggcacgttttgggggaggtgcctgcaggacccaacatactcaatgagcttccagcgcaatgtccgatcgctcggggccgactgccaagggaaaggatggaaagaagtattcctcgctcaacctgtttgatacgtataagggcaagtccttagagatccagaaacccgctgttgcccctcgccatggcctgcagagtctcgggaaagttgccattgcccggcgtatgccacctccagccaaccttccaagcctgaaagccgagaacaaaggcaatgaccccaatgtctcactagtgccaaaagacggaacaggatgggcaagcaaacaggagcagtccgaccccaagagttccgatgcctcaaccgctcagccgccggaatcgcagccactgccggcttcacagacgcctgcctccaaccagccgaaacgacccccagcagcccccgagaacactcctttggttccaagcggggtaaagtcctgggcacaagccagcgtcacccatggagcacatggagatggtggaagggcatcaagcctactgtcacgattctctcgagaggaatttccgaccctgcaggcggctggcgaccaggacaaggctgccaaggaaagggagtctgccgaacagtcgtctgggcccggaccaagcctccgcccccaaaattctacaacttggagggacggaggtgggcgtggccctgatgagctggagggcccggactccaaacttcatcatggtcatgatccccggggtgggctacagccttcaggcccaccccagttccctccctaccgcggaatgatgccgcctttcatgtatcccccatatctcccgttccctccgccctatggaccccaggggccttaccgataccccactcctgatgggcccagccgttttccccgtgtggcgggcccccgaggctcagggccaccaatgcgcttagtagagcctgtgggtcgtccctctattctcaaagaggataatctcaaagagtttgatcagttggatcaggagaatgatgatggttgggcaggggcccatgaagaggttgactacactgaaaagctcaagttcagcgatgaggaagatgggcgagactctgatgaggagggagctgagggccacagggattcccaatcagcttctggtgaggaacggccccctgaagcagatggcaaaaagggcaactcccccaacagcgaaccgcccactcctaagacggcctgggcagaaacctctcggcctccagagacagagccgggacctcctgccccaaagcctcccctaccccctggggactacccagatcgtgggggtcctccctgcaagcccccagcacctgaagatgaggatgaggcatggcggcagcgacgaaagcagtcgtcatctgagatttccctggcagtggagcgggcccggcgacggcgagaagaagaggagcggcgcatgcaagaagagcgccgggcagcctgtgctgagaagctcaagcgactcgatgaaaagtttggggcacctgacaagcggctcaaagcagagcctgctgccccacctgctgccccttctaccccagctccaccacctgcagtccctaaagaactccctgcacctccagctccacctccagcatcagccccaacaccagagaaagaacctgaagagccagcacaggcccctcctgcccaatctactcctactccaggtgtggctgcggctcccactctggtgagtggtggtggcagtaccagtagcaccagcagtggcagcttcgaagccagcccagtggaaccacaactgccctcaaaagagggtcctgaaccaccagaagaggttcctcctcctaccacacccccagttccaaaggtggaacccaagggtgatgggattggtcccacccgccagccccctagtcagggcttgggctaccccaaatatcagaagtcgttgcctcctcgtttccagcggcagcagcaggagcagctcctgaagcagcagcagcagcaccagtggcagcagcatcaacagggctctgcccctcctaccccagtgcccccatcaccaccacagcctgtgaccctgggggctgtgccagctccacaggctccacccccgccccccaaggccctgtacccaggtgctctgggccggcccccacccatgcccccaatgaactttgatccccgatggatgatgattcctccttatgtggacccccggctcctccagggtcgtccccctctagacttctaccctcctggtgtgcatccctctggcctagttccccgagagcgttcagacagtgggggctcaagctcagagccatttgaccgtcatgcacctgctatgttacgggaacggggcactccaccggtggatccaaagttggcctgggtaggagatgtcttcaccgccacacccgctgaaccccgcccacttacctcacctctgcgccaggctgcggatgaggatgacaaggggatgaggagcgagactcctccagtacctcccccaccaccctatctggccagttatccaggctttcctgagaatggagcccctgggcccccaatctctcgctttcctctggaggaaccagggccccgtccactcccctggcccccaggcagtgatgaagtggccaagatacaaactccaccacccaagaaggagccccctaaggaggagactgcacagctgacggggccagaagcaggccgaaagcctgcccgcggagtcgggagtggaggccagggccccccaccaccacgcagagagagtcgcacagagacccgctggggccctcgtccagggagcagtcgtcgtggaatccctccagaggagccaggggccccaccccgccgggctgggcctataaagaaacctccaccacctacaaaagtagaagagctgcctcccaagcccctcgaacagggggatgaaacccccaaacccccaaagccagacccactcaagataaccaaggggaagctagggggccccaaggagaccccacccaatggaaatctttcccctgccccaaggcttcggagggactattcgtatgaaagagtgggtcctacctcttgccggggtcggggccgaggcgagtattttgccagagggaggggttttcgggggacctatgggggacgagggcggggagcccgaagccgggaattccgcagttaccgagagtttcgaggagatgatgggcgtggaggtgggacagggggaccaaaccaccctcctgctccccgaggccgcactgccagcgagacacggagcgagggttcagagtatgaggaaatccccaagcggcgccggcagcggggctcagaaacaggcagcgagacccatgagagtgatctggctccttcagacaaggaggctcccacacccaaggagggaacactcacccaggtccctctcgctcccccaccaccaggagccccaccttcaccagccccagcccgcttcactgcccggggtgggcgagtcttcactcccagaggggtgccatctcgccggggccgaggaggagggaggccccctcctcaagtttgcccaggctggagccctccagccaagtctctggctcccaagaaacctcccacaggccctttgccaccaagtaaggagcctttgaaagagaagttgatcccagggcctctgtcccctgtggcgcgcggaggcagcaatggaggtagcaatgtgggcatggaagatggggagcgaccccgaaggaggcgacatgggagggctcagcagcaggataaaccgcctcgtttccggaggctgaagcaggaacgggagaatgccgcaagggggtctgagggcaagccctccctaacccttccagcctccgctcctgcacctgaggaggccctcacaacagtcacagtggccccagcacctcgccgggcagctgccaagtctcctgatctgtcaaaccagaactcagaccaagccaatgaggaatgggagactgcatcagagagcagtgacttcaccagtgagcgccgaggggacaaagaggcacccccaccagtactgctgacacccaaggctgtgggaactcctgggggaggtggaggtggagccgtaccaggtatttcagccatgtcccgcggagatctgagccagagagccaaggatttgagtaaacggagcttctcaagtcagcggccaggcatggaacggcagaatcggcgccctggcccagggggcaaggctggcagcagtggcagcagcagtggaggaggcggtgggggtcctggaggaaggaccgggccaggacgaggcgacaagaggagctggccctctcccaagaaccgaagtcgtcctccagaggagcgtcccccggggcttcccctgcctcccccacctcccagcagttctgctgtcttccgcctggaccaagttatccacagcaaccctgctggcatccaacaggctctggcccagcttagtagccgtcaagggagtgtaactgcaccagggggtcatccaaggcacaagcctgggcctccccaagcccctcagggcccctctcctaggcccccaacccgatacgagccccagagggtcaacagcggcctcagttctgacccccactttgaggagccggggccaatggtgagaggggtgggtgggactcctcgggactctgccggggttagtccctttccccctaaacgtcgggagcggcctcccagaaaaccagagctgctacaggaggaatctttgccacctcctcatagctctggattcttgggctctaagcctgagggcccaggccctcaggcagagtccagagatacaggcacagaggccctgacccctcacatctggaaccgtttacatactgccactagccgaaagagttaccggcccagctccatggagccttggatggagcccctgagtccttttgaggatgtggctggcacagaaatgagtcagtctgacagtggggtggacctgagtggggattctcaggtgtcatcaggtccctgcagccagcgaagttcccctgatggaggactcaagggggcagcagagggaccccccaagaggcctggaggctcctcacccctgaatgctgttccttgtgagggtccacctggctctgaacctcctaggagaccaccacctgccccccacgatggggacagaaaggagctgccccgggagcagcctctgccccctggccccattggcacagaacgatcacagcatacagaccgaggcacagagcctggccccattcggccatcccatcgacctggtcccccagtccagtttggcactagtgacaaggactcagacttacgcctagtggtaggagacagcttgaaagcagagaaggagctaacagcatcagtcactgaggccattcctgtatcacgagactgggagctgcttcccagtgctgctgcctctgctgagccacaatccaagaacctggattctgggcactgtgtcccggagcccagctcctcaggccagcgcctgtatcctgaggttttctatggcagtgctgggccttccagttctcagatctctgggggagccatggactctcaattacatccaaacagtggaggcttccgccctgggacaccctcactgcacccttacagatcacagcccctatacctaccccccggcccagcccctccctcagcactgctctctggggtagctctcaagggccagtttctggatttctccacaatgcaagctacagagctggggaagttgccggctggaggagttctctaccctccaccttccttcctctactctccggctttctgccccagtcctttgcctgacacatcgttgcttcaggtacgccaggatctgccatccccttcggatttttattctactcctctgcagcctggtggccaaagtggctttctcccttcaggggctcctgcccagcagatgcttctacccatggtagactcacagctgcctgtggtgaactttggctccctgccgccagcaccacctcctgccccacctcccctttctctgttacctgtgggccctgctctgcagccccccagcctggctgtgcggcccccacctgctcctgctactcgggtgctgccttcacctgccaggcccttccccgctagcttggggcgagcagagctgcatccagtggaactaaagccgttccaggattatcaaaaactgagcagcaaccttgggggacctggatcatcacggactcccccaactggaaggtccttctctggcctcaattcccgtctcaaggccacgccttccacctacagtggagtcttccgcacccagcgcgtcgacctttaccagcaggcctccccaccagatgccctgcgctggatacctaagccttgggagcggacagggctgccacctcgagaagggccctcccgacgggcagaggagcctgggtcccgaggggacaaggagcctgggttgcccccaccccgctgagggagttcctcttgccccctacccccggggcttgtatatagattataaatatataagggggaaaggggtgggcggggaggggttgtggggctggggcctcacttcccctcctcccccttcccctggtcccctgtccctggggctgtttgttaaaaaagagtaataaaaggattt

SEQ ID NO: 10 - DNA, 2197 bp, Homo sapiens
gccgcgagggcggggcccgcagttcggttgcgctgcggagcgcagctgtgagggagtcgctgtgatccggggccccggaacccgagctggagctgaagcgcaggctgcggggcgcggagtcgggaggcctgagtgttccttccagcatgtcggagggggagtcccagacagtacttagcagtggctcagacccaaaggtagaatcctcatcttcagctcctggcctgacatcagtgtcacctcctgtgacctccacaacctcagctgcttccccagaggaagaagaagaaagtgaagatgagtctgagattttggaagagtcgccctgtgggcgctggcagaagaggcgagaagaggtgaatcaacggaatgtaccaggtattgacagtgcatacctggccatggatacagaggaaggtgtagaggttgtgtggaatgaggtacagttctctgaacgcaagaactacaagctgcaggaggaaaaggttcgtgctgtgtttgataatctgattcaattggagcatcttaacattgttaagtttcacaaatattgggctgacattaaagagaacaaggccagggtcatttttatcacagaatacatgtcatctgggagtctgaagcaatttctgaagaagaccaaaaagaaccacaagacgatgaatgaaaaggcatggaagcgttggtgcacacaaatcctctctgccctaagctacctgcactcctgtgacccccccatcatccatgggaacctgacctgtgacaccatcttcatccagcacaacggactcatcaagattggctctgtggctcctgacactatcaacaatcatgtgaagacttgtcgagaagagcagaagaatctacacttctttgcaccagagtatggagaagtcactaatgtgacaacagcagtggacatctactcctttggcatgtgtgcactggagatggcagtgctggagattcagggcaatggagagtcctcatatgtgccacaggaagccatcagcagtgccatccagcttctagaagacccattacagagggagttcattcaaaagtgcctgcagtctgagcctgctcgcagaccaacagccagagaacttctgttccacccagcattgtttgaagtgccctcgctcaaactccttgcggcccactgcattgtgggacaccaacacatgatcccagagaacgctctagaggagatcaccaaaaacatggatactagtgccgtactggctgaaatccctgcaggaccaggaagagaaccagttcagactttgtactctcagtcaccagctctggaattagataaattccttgaagatgtcaggaatgggatctatcctctgacagcctttgggctgcctcggccccagcagccacagcaggaggaggtgacatcacctgtcgtgcccccctctgtcaagactccgacacctgaaccagctgaggtggagactcgcaaggtggtgctgatgcagtgcaacattgagtcggtggaggagggagtcaaacaccacctgacacttctgctgaagttggaggacaaactgaaccggcacctgagctgtgacctgatgccaaatgagaatatccccgagttggcggctgagctggtgcagctgggcttcattagtgaggctgaccagagccggttgacttctctgctagaagagaccttgaacaagttcaattttgccaggaacagtaccctcaactcagccgctgtcaccgtctcctcttagagctcactcgggccaggccctgatctgcgctgtggctgtccctggacgtgctgcagccctcctgtcccttccccccagtcagtattaccctgtgaagccccttccctcctttattattcaggagggctgggggggctccctggttctgagcatcatcctttcccctcccctctcttcctcccctctgcactttgtttacttgttttgcacagacgtgggcctgggccttctcagcagccgccttctagttgggggctagtcgctgatctgccggctcccgcccagcctgtgtggaaaggaggcccacgggcactaggggagccgaattctacaatcccgctggggcggccggggcgggagagaaaggtggtgctgcagtggtggccctggggggccattcgattcgcctcagttgctgctgtaataaaagtctactttttgct

SEQ ID NO: 11 - DNA, 6113 bp, Homo sapiens
taatacttaattaccttctaataattggagcagaagatgaacccaactaatcctttcagtgggcagcagcctagtgctttttcggcgtcttctagtaatgtaggaacacttccatctaagccgccatttcgatttggtcaaccttctctttttggacaaaacagtaccttatctgggaagagctcgggattttcacaggtatccagctttccagcgtcttctggagtaagtcattcctcttcagtgcaaacattagggttcacccaaacctcaagtgttggacccttttctggacttgagcacacttccacctttgtggctacctctgggccttcaagttcatctgtgctgggaaacacaggatttagttttaaatcacccaccagtgttggggctttcccaagcacttctgcttttggacaagaagctggagaaatagtgaactctggttttgggaaaacagaattcagctttaaacctctggaaaatgcagtgttcaaaccaatactgggggctgaatctgagccagagaaaacccagagccaaattgcttctgggttttttacattttcccacccaattagtagtgcacctggaggcctggcccctttctcttttcctcaagtaacaagtagttcagctaccacttcaaattttaccttttcaaaacctgttagtagtaataattcattatctgcctttacccctgctttgtcaaaccaaaatgtagaggaagagaagagaggacctaagtcaatatttggaagttctaataatagcttcagtagcttccctgtatcatctgcggttttgggcgaacctttccaggctagcaaagcaggtgtcaggcaggggtgtgaagaagctgtttcccaggtggaaccacttcccagcctaatgaaaggactgaaaaggaaggaggaccaggatcgctccccaaggagacatggccacgagccagcagaagattcggatcctctgtcccggggcgatcatcctccagacaaacgacctgtccgcctgaatcgaccccggggaggtactttatttggtcggacgatacaggatgttttcaaaagcaataaggaagtaggtcgtctgggcaacaaggaggccaaaaaggaaactggctttgttgagtctgcagaaagtgaccacatggctatcccaggagggaatcagtctgtcctggcaccttcccggattccaggtgtgaataaagaggaagaaactgaaagtagagagaagaaagaagattctctaagaggaactccggcgcgtcagagtaacagaagcgagagcacagacagtcttgggggcttgtctccctctgaagtcacagccatccagtgcaagaacatccctgactacctcaacgacaggaccattctggagaaccattttggcaaaattgctaaagtgcagcgcatctttaccaggcgcagcaaaaagcttgcagtggtacatttctttgatcatgcatctgcagccctggctagaaagaaggggaaaagtttgcataaagacatggctatcttttggcacaggaagaaaataagccccaataagaaacccttttccctgaaggagaagaaaccaggtgacggtgaagtcagcccgagcacagaggatgcaccctttcagcactctcctcttggcaaggccgcagggaggactggtgctagcagcctcctgaataaaagctctccagtgaagaagccaagtcttctaaaggcccaccaattcgagggagactcttttgactcagcctccgagggctccgagggcctcgggccatgtgtgctctccctcagtaccctgataggcactgtggctgagacatccaaggagaagtaccgcctgcttgaccagagagacaggatcatgcggcaagctcgggtgaagagaaccgatctggacaaagcgaggacttttgttggcacctgcctggatatgtgtcctgagaaggagaggtacatgcgggagacccgtagccagctgagcgtgttcgaagtggtcccagggactgaccaggtggaccacgcagcagctgtgaaagagtacagtcggtcctcggcggatcaggaggagcccctgccccacgagctgcggcccttgccagtgctcagcaggaccatggactacctggtgacccagatcatggaccagaaggagggcagcctgcgggattggtatgacttcgtgtggaaccgcacgcgtggcatacggaaggatatcacgcagcagcacctctgtgaccccctgacggtgtccctgattgagaagtgcacccggtttcacatccactgtgcccacttcatgtgtgaggagcccatgtcctcctttgatgccaagatcaataatgagaacatgaccaagtgcctgcagagcctgaaggagatgtaccaggacctgagaaacaagggtgtcttctgtgccagcgaagcggagttccagggctacaatgttctgctcagtctcaacaagggagacatcctaagagaagtacaacagttccatcctgctgttagaaactcatctgaggtgaaatttgctgttcaggcttttgctgcattgaacagtaataattttgtgagatttttcaaactggtccagtcagcttcttacctgaacgcttgtcttttacactgttacttcagtcagatccgcaaggatgctctccgggcgctcaactttgcgtacacggtgagcacacagcgatctaccatctttcccctggatggtgtggtgcgcatgctgctgttcagagactgtgaagaggccaccgacttcctcacctgccacggcctcaccgtttccgacggctgtgtggagctgaaccggtctgcattcctggaaccagagggattatccaagaccaggaagtcggtgtttattactaggaagctgacggtgtcagtcggggaaattgtgaacggagggccattgccccccgtccctcgtcatacccctgtgtgcagcttcaactcccagaacaagtacatcggggagagcctggccgcggagctgcccgtcagcacccagagacccggctccgacacagtgggcggagggagaggagaggagtgtggtgtagagccggatgcacccctgtccagtctcccacagtctctaccagcccctgcgccctcaccagtgcctctgcctcctgtcctggcactgaccccgtctgtggcgcccagcctcttccagctgtctgtgcagcctgaaccaccgcctccagagcccgtgcccatgtactctgacgaggacctggcgcaggtggtggacgagctcatccaggaggccctgcagagggactgtgaggaagttggctctgcgggtgctgcctacgcagctgccgccctgggtgtttctaatgctgctatggaggatttgttaacagctgcaaccacgggcattttgaggcacattgcagctgaagaagtgtctaaggaaagagagcgaagggagcaggagaggcagcgggctgaagaggaaaggttgaaacaagagagagagctggtgttaagtgagctgagccagggcctggccgtggagctgatggaacgcgtgatgatggagtttgtgagggaaacctgctcccaggagttgaagaatgcagtagagacagaccagagggtccgtgtggcccgttgctgtgaggatgtctgtgcccacttagtggacttgtttctcgtggaggaaatcttccagactgcaaaggagaccctccaggagcttcagtgcttctgcaagtatctacagcggtggagggaagctgtcacagcccgcaagaaactgaggcgccaaatgcgggctttccctgctgcgccctgctgcgtggacgtgagcgaccggctgagggcgctggcgcccagcgcagagtgccccattgctgaagagaacctggccaggggcctcctggacctgggccatgcagggagattgggcatctcctgcaccaggttaaggcggctcagaaacaagacagctcaccagatgaaggttcagcacttctaccagcagctgctgagtgatgtggcatgggcgtctctggacctgccatccctcgtggctgagcacctccctgggaggcaggagcatgtgttttggaagctggtgctggtgttgccggatgtagaggagcagtccccagagagttgtggcagaattctagcaaattggttaaaagtcaagttcatgggagatgaaggctcagtggatgacacatccagcgatgctggtgggattcagacgctttcgcttttcaactcacttagcagcaaaggggatcagatgatttctgttaacgtgtgtataaaggtggcccatggcgccctcagtgatggtgccattgatgctgtggagacacagaaggacctcctgggagccagtgggctcatgctgctgcttccccccaaaatgaagagtgaggacatggcagaggaggacgtgtactggctgtcggccttgctgcagctcaagcagctcctgcaggctaagcccttccagcctgcgcttcctctggtggttcttgtgcctagcccaggaggggacgccgttgagaaggaagtagaagatggtctgatgctacaggacttggtttcagctaagctgatttcagattacactgttaccgagatccctgataccattaatgatctacaaggttcaactaaggttttgcaagcagtgcagtggctggtttcccactgcccccattcccttgacctctgctgccagactctcattcagtacgtcgaagacgggattggccatgagtttagtggccgctttttccatgacagaagagagaggcgtctgggcggtcttgcttctcaggagcctggcgccatcattgagctgtttaacagtgtgctgcagttcctggcttctgtggtgtcctctgaacagctgtgtgacctgtcctggcctgtcactgagtttgctgaggcagggggcagccggctgcttcctcacctgcactggaatgccccagagcacctggcctggctgaagcaggctgtgctcgggttccagcttccgcagatggaccttccacccctgggggccccctggctccccgtgtgctccatggttgtccagtacgcctcccagatccccagctcacgccagacacagcctgtcctccagtcccaggtggagaacctgctccacagaacctactgtaggtggaagagcaagagtccctccccagtccatggggcaggcccctcggtcatggagatcccatgggatgatcttatcgccttgtgtatcaaccacaagctgagagactggacgcccccccggcttcctgttacatcagaggcgctgagtgaagatggtcagatatgtgtgtatttttttaaaaacgatttgaaaaaatatgatgttcctttgtcgtgggaacaagccaggttgcagacgcagaaggagctacagctgagagagggacgtttggcaataaagccttttcatccttctgcaaacaattttcccataccattgcttcacatgcaccgtaactggaagaggagcacagagtgtgctcaagaggggaggattcccagcacagaggatctgatgcgaggagcttctgctgaggagctcttggcgcagtgtttgtcgagcagtctgctgctggagaaagaagagaacaagaggtttgaagatcagcttcagcaatggttgtctgaagactcaggagcatttacggatttaacttcccttcccctctatcttcctcagactctagtgtctctttctcacactattgaacctgtgatgaaaacatctgtaactactagcccacagagtgacatgatgagggagcaactgcagctgtcagaggcgacaggaacgtgtctaggcgaacgactaaagcacctggaaaggctgatccggagttcaagggaagaggaagttgcctctgagctccatctctctgcgctgctagacatggtggacatttgagcagcctgacctgtggggagggggtctctcccgaagagtttctgtttttactcaaaataatgttattctcagatgcttgatgcactgttggaaatgtgattaatttaatcatgcagataaaccatttaaatgtc

SEQ ID NO: 12 - DNA, 6493 bp, Homo sapiens
gaagtccggccttccgagagctagctgtccgccgcggcccccgcacgccgggcagccgtccctcgccgcctcgggcgcgccaccatggggccccggctcagcgtctggctgctgctgctgcccgccgcccttctgctccacgaggagcacagccgggccgctgcgaagggtggctgtgctggctctggctgtggcaaatgtgactgccatggagtgaagggacaaaagggtgaaagaggcctcccggggttacaaggtgtcattgggtttcctggaatgcaaggacctgaggggccacagggaccaccaggacaaaagggtgatactggagaaccaggactacctggaacaaaagggacaagaggacctccgggagcatctggctaccctggaaacccaggacttcccggaattcctggccaagacggcccgccaggccccccaggtattccaggatgcaatggcacaaagggggagagagggccgctcgggcctcctggcttgcctggtttcgctggaaatcccggaccaccaggcttaccagggatgaagggtgatccaggtgagatacttggccatgtgcccgggatgctgttgaaaggtgaaagaggatttcccggaatcccagggactccaggcccaccaggactgccagggcttcaaggtcctgttgggcctccaggatttaccggaccaccaggtcccccaggccctcccggccctccaggtgaaaagggacaaatgggcttaagttttcaaggaccaaaaggtgacaagggtgaccaaggggtcagtgggcctccaggagtaccaggacaagctcaagttcaagaaaaaggagacttcgccaccaagggagaaaagggccaaaaaggtgaacctggatttcaggggatgccaggggtcggagagaaaggtgaacccggaaaaccaggacccagaggcaaacccggaaaagatggtgacaaaggggaaaaagggagtcccggttttcctggtgaacccgggtacccaggactcataggccgccagggcccgcagggagaaaagggtgaagcaggtcctcctggcccacctggaattgttataggcacaggacctttgggagaaaaaggagagaggggctaccctggaactccggggccaagaggagagccaggcccaaaaggtttcccaggactaccaggccaacccggacctccaggcctccctgtacctgggcaggctggtgcccctggcttccctggtgaaagaggagaaaaaggtgaccgaggatttcctggtacatctctgccaggaccaagtggaagagatgggctcccgggtcctcctggttcccctgggccccctgggcagcctggctacacaaatggaattgtggaatgtcagcccggacctccaggtgaccagggtcctcctggaattccagggcagccaggatttataggcgaaattggagagaaaggtcaaaaaggagagagttgcctcatctgtgatatagacggatatcgggggcctcccgggccacagggacccccgggagaaataggtttcccagggcagccaggggccaagggcgacagaggtttgcctggcagagatggtgttgcaggagtgccaggccctcaaggtacaccagggctgataggccagccaggagccaagggggagcctggtgagttttatttcgacttgcggctcaaaggtgacaaaggagacccaggctttccaggacagcccggcatgccagggagagcgggttctcctggaagagatggccatccgggtcttcctggccccaagggctcgccgggttctgtaggattgaaaggagagcgtggcccccctggaggagttggattcccaggcagtcgtggtgacaccggcccccctgggcctccaggatatggtcctgctggtcccattggtgacaaaggacaagcaggctttcctggaggccctggatccccaggcctgccaggtccaaagggtgaaccaggaaaaattgttcctttaccaggcccccctggagcagaaggactgccggggtccccaggcttcccaggtccccaaggagaccgaggctttcccggaaccccaggaaggccaggcctgccaggagagaagggcgctgtgggccagccaggcattggatttccagggccccccggccccaaaggtgttgacggcttacctggagacatggggccaccggggactccaggtcgcccgggatttaatggcttacctgggaacccaggtgtgcagggccagaagggagagcctggagttggtctaccgggactcaaaggtttgccaggtcttcccggcattcctggcacacccggggagaaggggagcattggggtaccaggcgttcctggagaacatggagcgatcggaccccctgggcttcaggggatcagaggtgaaccgggacctcctggattgccaggctccgtggggtctccaggagttccaggaataggcccccctggagctaggggtccccctggaggacagggaccaccggggttgtcaggccctcctggaataaaaggagagaagggtttccccggattccctggactggacatgccgggccctaaaggagataaaggggctcaaggactccctggcataacgggacagtcggggctccctggccttcctggacagcagggggctcctgggattcctgggtttccaggttccaagggagaaatgggcgtcatggggacccccgggcagccgggctcaccaggaccagtgggtgctcctggattaccgggtgaaaaaggggaccatggctttccgggctcctcaggacccaggggagaccctggcttgaaaggtgataagggggatgtcggtctccctggcaagcctggctccatggataaggtggacatgggcagcatgaagggccagaaaggagaccaaggagagaaaggacaaattggaccaattggtgagaagggatcccgaggagaccctgggaccccaggagtgcctggaaaggacgggcaggcaggacagcctgggcagccaggacctaaaggtgatccaggtataagtggaaccccaggtgctccaggacttccgggaccaaaaggatctgttggtggaatgggcttgccaggaacacctggagagaaaggtgtgcctggcatccctggcccacaaggttcacctggcttacctggagacaaaggtgcaaaaggagagaaagggcaggcaggcccacctggcataggcatcccagggctgcgaggtgaaaagggagatcaagggatagcgggtttcccaggaagccctggagagaagggagaaaaaggaagcattgggatcccaggaatgccagggtccccaggccttaaagggtctcccgggagtgttggctatccaggaagtcctgggctacctggagaaaaaggtgacaaaggcctcccaggattggatggcatccctggtgtcaaaggagaagcaggtcttcctgggactcctggccccacaggcccagctggccagaaaggggagccaggcagtgatggaatcccggggtcagcaggagagaagggtgaaccaggtctaccaggaagaggattcccagggtttccaggggccaaaggagacaaaggttcaaagggtgaggtgggtttcccaggattagccgggagcccaggaattcctggatccaaaggagagcaaggattcatgggtcctccggggccccagggacagccggggttaccgggatccccaggccatgccacggaggggcccaaaggagaccgcggacctcagggccagcctggcctgccaggacttccgggacccatggggcctccagggcttcctgggattgatggagttaaaggtgacaaaggaaatccaggctggccaggagcacccggtgtcccagggcccaagggagaccctggattccagggcatgcctggtattggtggctctccaggaatcacaggctctaagggtgatatggggcctccaggagttccaggatttcaaggtccaaaaggtcttcctggcctccagggaattaaaggtgatcaaggcgatcaaggcgtcccgggagctaaaggtctcccgggtcctcctggccccccaggtccttacgacatcatcaaaggggagcccgggctccctggtcctgagggccccccagggctgaaagggcttcagggactgccaggcccgaaaggccagcaaggtgttacaggattggtgggtatacctggacctccaggtattcctgggtttgacggtgcccctggccagaaaggagagatgggacctgccgggcctactggtccaagaggatttccaggtccaccaggccccgatgggttgccaggatccatggggcccccaggcaccccatctgttgatcacggcttccttgtgaccaggcatagtcaaacaatagatgacccacagtgtccttctgggaccaaaattctttaccacgggtactctttgctctacgtgcaaggcaatgaacgggcccatggccaggacttgggcacggccggcagctgcctgcgcaagttcagcacaatgcccttcctgttctgcaatattaacaacgtgtgcaactttgcatcacgaaatgactactcgtactggctgtccacccctgagcccatgcccatgtcaatggcacccatcacgggggaaaacataagaccatttattagtaggtgtgctgtgtgtgaggcgcctgccatggtgatggccgtgcacagccagaccattcagatcccaccgtgccccagcgggtggtcctcgctgtggatcggctactcttttgtgatgcacaccagcgctggtgcagaaggctctggccaagccctggcgtcccccggctcctgcctggaggagtttagaagtgcgccattcatcgagtgtcacggccgtgggacctgcaattactacgcaaacgcttacagcttttggctcgccaccatagagaggagcgagatgttcaagaagcctacgccgtccaccttgaaggcaggggagctgcgcacgcacgtcagccgctgccaagtctgtatgagaagaacataatgaagcctgactcagctaatgtcacaacatggtgctacttcttcttctttttgttaacagcaacgaaccctagaaatatatcctgtgtacctcactgtccaatatgaaaaccgtaaagtgccttataggaatttgcgtaactaacacaccctgcttcattgacctctacttgctgaaggagaaaaagacagcgataagctttcaatagtggcataccaaatggcacttttgatgaaataaaatatcaatattttctgcaatccaatgcactgatgtgtgaagtgagaactccatcagaaaaccaaagggtgctaggaggtgtgggtgccttccatactgtttgcccattttcattcttgtattataattaattttctacccccagagataaatgtttgtttatatcactgtctagctgtttcaaaatttaggtcccttggtctgtacaaataatagcaatgtaaaaatggttttttgaacctccaaatggaattacagactcagtagccatatcttccaaccccccagtataaatttctgtctttctgctatgtgtggtactttgcagctgcttttgcagaaatcacaattttcctgtggaataaagatggtccaaaaatagtcaaaaattaaatatatatatatattagtaatttatatagatgtcagcaattaggcagatcaaggtttagtttaacttccactgttaaaataaagcttacatagttttcttcctttgaaagactgtgctgtcctttaacataggtttttaaagactaggatattgaatgtgaaacatccgttttcattgttcacttctaaaccaaaaattatgtgttgccaaaaccaaacccaggttcatgaatatggtgtctattatagtgaaacatgtactttgagcttattgtttttattctgtattaaatattttcagggttttaaacactaatcacaaactgaatgacttgacttcaaaagcaacaaccttaaaggccgtcatttcattagtattcctcattctgcatcctggcttgaaaaacagctctgttgaatcacagtatcagtattttcacacgtaagcacattcgggccatttccgtggtttctcatgagctgtgttcacagacctcagcagggcatcgcatggaccgcaggagggcagattcggaccactaggcctgaaatgacatttcactaaaagtctccaaaacatttctaagactactaaggccttttatgtaatttctttaaatgtgtatttcttaagaattcaaatttgtaataaaactatttgtataaaaattaagcttttattaatttgttgctagtattgccacagacgcattaaaagaaacttactgcacaagctgctaataaatttgtaagctttgcatacctt

SEQ ID NO: 13 - DNA, 2718 bp, Homo sapiens
gcgaccgctccccggcgggagccagcgaaggtttccatgtcagaggccgatggagaactgaagattgccacctacgcacaaaggccattgagacacttcgtgtagctggaagacaccaacttcctgacaggagctttatttcatttgggatttcaagtttacagatggtatcttctcaaaagttggaaaaacctatagagatgggcagtagcgaaccccttcccatcgcagatggtgacaggaggaggaagaagaagcggaggggccgggccactgactccttgccaggaaagtttgaagatatgtacaagctgacctctgaattgcttggagagggagcctatgccaaagttcaaggtgccgtgagcctacagaatggcaaagagtatgccgtcaaaatcatcgagaaacaagcagggcacagtcggagtagggtgtttcgagaggtggagacgctgtatcagtgtcagggaaacaagaacattttggagctgattgagttctttgaagatgacacaaggttttacttggtctttgagaaattgcaaggaggttccatcttagcccacatccagaagcaaaagcacttcaatgagcgagaagccagccgagtggtgcgggacgttgctgctgcccttgacttcctgcataccaaagacaaagtctctctctgtcacctaggctggagtgctatggcgccatcagggctcactgcagccccaacctccctgggctccagtgatcctcccacctcagcctcccaagtagctgggactacaggcattgctcatcgtgatctgaaaccagaaaatatattgtgtgaatctccagaaaaggtgtctccagtgaaaatctgtgactttgacttgggcagtgggatgaaactgaacaactcctgtacccccataaccacaccagagctgaccaccccatgtggctctgcagaatacatggcccctgaggtagtggaggtcttcacggaccaggccacattctacgacaagcgctgtgacctgtggagcctgggcgtggtcctctacatcatgctgagtggctacccacccttcgtgggtcactgcggggccgactgtggctgggaccggggcgaggtctgcagggtgtgccagaacaagctgtttgaaagcatccaggaaggcaagtatgagtttcctgacaaggactgggcacacatctccagtgaagccaaagacctcatctccaagctcctggtgcgagatgcaaagcagagacttagcgccgcccaagttctgcagcacccatgggtgcaggggcaagctccagaaaagggactccccacgccgcaagtcctccagaggaacagcagcacaatggacctgacgctcttcgcagctgaggccatcgcccttaaccgccagctatctcagcacgaagagaacgaactagcagaggagccagaggcactagctgatggcctctgctccatgaagctttcccctccctgcaagtcacgcctggcccggagacgggccctggcccaggcaggccgtggtgaagacaggagcccgcccacagcactctgaaatgctccagtcacaccttataggccctaggcctggccaggcattgtcccctggaaacctgtgtggctaaagtctgctgagcaggcagcagcctctgctctgtggctccattcaggctttttcatctacgaaggccctgaggttcccatcaacccccatttccctagggtcctggaggaaaaagctttttccaaaggggttgtctttgaaaaggaaagcaatcacttctcactttgcataattgcctgcagcaggaacatctcttcactgggctccacctgctcacccgcctgcagatctgggatccagcctgctctcaccgctgtagctgtggcggctggggctgcagcctgcagggagaagcaagaagcatcagttgacagaggctgccgacacgtgcctcttccctctcttctctgtcaccctcctctggcggtccttccaccttcctctgtcctccggatgtcctctttgcccgtcttctcccttggctgagcaaagccatcccctcaattcagggaagggcaaggagccttcctcattcaggaaatcaaatcagtcttccggtctgcagcacggaaaagcacataatctttctttgctgtgactgaaatgtatccctcgtttatcatcccctttgtttgtgattgctgctaaagtcagtagtatcgtttttttaaaaaaaaagtttggtgtttttaaccatgctgttccagcaaagatgataccttaaactcccactgcaagcccatgaacttcccagagagtggaacggcttgctcttctttctagaatgtccatgcacttgggttttaatcagcagttccctattattctgattttaagctgttcctgtgatgaacttagagacagcatcggtgtctgctgctgtgtccccaggtcttgtgtgggtggcacagatctgggcagttagatagtgctctgtgcctaaggtgaagccacactagggtgaagcctcacttccctgtttgagcaatgcagtgcctgctgcccgtgtgcatgaaggtacagccattcagataagtggaactattgagttacataaagaaaatagatttgcatttgtcaggcagacgtttatacaacaccacggtgcttttatacattgtgcttattttaataaaactgaaattct

SEQ ID NO: 14 - DNA, 1840 bp, Homo sapiens
gcggcgcgagccacatgcgagcgggcgcctggcggcggcggcggcggcaccagcgatcccagcagcggccacgacgcggacgcgcctgcggcccggggagcagcagcagccacagccacagcagccgccactgcagttagagcggcagcagcagcgacagccacagcagcagccgccgcggagagcggcgctcggcgggcgcgccctcctgaaggaagccgcccgccccccaccgccgccccctccggcgtgttcatgcccccggggccccagggagcgccatggcccgcgcacgccaggagggcagctccccggagcccgtagagggcctggcccgcgacggcccgcgccccttcccgctcggccgcctggtgccctcggcagtgtcctgcggcctctgcgagcccggcctggctgccgcccccgccgcccccaccctgctgcccgctgcctacctctgcgcccccaccgccccacccgccgtcaccgccgccctggggggttcccgctggcctgggggtccccgcagccggccccgaggcccgcgcccggacggtcctcagccctcgctctcgctggcggagcagcacctggagtcgcccgtgcccagcgccccgggggctctggcgggcggtcccacccaggcggccccgggagtccgcggggaggaggaacagtgggcccgggagatcggggcccagctgcggcggatggcggacgacctcaacgcacagtacgagcggcggagacaagaggagcagcagcggcaccgcccctcaccctggagggtcctgtacaatctcatcatgggactcctgcccttacccaggggccacagagcccccgagatggagcccaattaggtgcctgcacccgcccggtggacgtcagggactcggggggcaggcccctcccacctcctgacaccctggccagcgcgggggactttctctgcaccatgtagcatactggactcccagccctgcctgtcccgggggcgggccggggcagccactccagccccagcccagcctggggtgcactgacggagatgcggactcctgggtccctggccaagaagccaggagagggacggctgatggactcagcatcggaaggtggcggtgaccgagggggtggggactgagccgcccgcctctgccgcccaccaccatctcaggaaaggctgttgtgctggtgcccgttccagctgcaggggtgacactgggggggggggggctctcctctcggtgctccttcactctgggcctggcctcaggcccctggtgcttccccccctcctcctgggagggggcccgtgaagagcaaatgagccaaacgtgaccactagcctcctggagccagagagtggggctcgtttgccggttgctccagcccggcgcccagccatcttccctgagccagccggcgggtggtgggcatgcctgcctcaccttcatcagggggtggccaggaggggcccagactgtgaatcctgtgctctgcccgtgaccgccccccgccccatcaatcccattgcataggtttagagagagcgacgtgtgaccactggcattcatttggggggtgggagattttggctgaagccgccccagccttagtccccagggccaagcgctggggggaagacggggagtcagggagggggggaaatctcggaagagggaggagtctgggagtggggagggatggcccagcctgtaagatactgtatatgcgctgctgtagataccggaatgaattttctgtacatgtttggttaattttttttgtacatgatttttgtatgtttccttttcaataaaatcagattggaaca

SEQ ID NO: 15 - DNA, 3093 bp, Homo sapiens
tagaatctgttcaggaagttggaggttcttactggcaaagagtaactctcatcctggaattactgcagcacaaaaagaagctcagaagtcctcagatattggtgccaactctttttaacttgctatcaagatgtttagaacccttgccacaagagcagggaaatatggaatacaccaaacaattaattcttagttgtctgctcaacatctgccaaaaactatctccagatggtggcaaaatacccaaagatattttagatgaggagaagttcaacgtggagttgatagttcagtgcatccgcctttcggagatgccgcagacccatcaccatgcccttttacttttgggcactgttgctggaatatttccggataaagttttacacaatatcatgtctatttttacatttatgggagccaatgtcatgcgcctagatgatacttacagttttcaagttattaacaagacagtgaaaatggttattcccgcacttattcagtctgatagtggagattctatagaagtttcaagaaacgttgaagagattgtggtaaaaatcattagtgtatttgtggatgcgctgccacacgtcccggagcacaggcgcctgcccatccttgttcaacttgttgatacactgggtgcagagaaattcctctggattctcctcatcttgctttttgaacagtatgtcacaaaaacagtgctggcggctgcctatggcgaaaaggatgctattttagaagcagacactgaattttggttttcagtctgttgtgagtttagtgtccagcatcagatacaaagcttgatgaatatcctccagtacttactaaagctgccagaggaaaaagaagaaaccattcccaaagcagtgtcatttaataagagtgaatcacaagaagaaatgctacaggtttttaatgtagagactcacactagcaagcaactgcggcattttaaatttttgtcagtgtccttcatgtctcagctcctgtcttccaatgattttctgaaaaaggtagttgagagtggtggtcctgagattttaaaaggccttgaagagaggttgctggagaccgttctcggctatatcagtgcagttgcacagtccatggaaaggaacgcagacaaactcaccgtgaagttctggcgcgcgctccttagtaaagcttacgacctgttagataaggtcaatgccttgctgcccacagagacattcattcctgtgatcagagggctggtgggcaatcccctgccatctgttcgccgcaaagcgctggaccttttgaataacaagctgcagcaaaatatatcctggaagaagacaatagttacccgtttcctaaaactggttccagaccttttggccattgtgcagcgtaagaaaaaggaaggggaagaagaacaagcaatcaacagacagacagcgttgtataccttaaagcttttatgcaagaattttggtgcagaaaatccagatccttttgtcccagtgctgagcactgctgtgaaactgattgctccagagagaaaggaggagaagaatgtcttgggaagcgcgctgctgtgcatagcagaggtgacctccaccctggaggcgctggccatcccccagcttcccagcctgatgccatcgttgctgacaacaatgaagaacaccagcgagctggtctccagcgaggtctacctgctcagtgccttggctgctctgcagaaggttgtggagactctcccgcacttcatcagcccctatctggaaggcattctctcccaggtgattcatctggagaaaatcactagtgaaatgggttctgcgtcacgggctaatatccgtctcacatctcttaaaaagacactggctaccacacttgcaccccgagtcctgttgcccgccatcaaaaaaacttacaagcagattgagaagaactggaagaatcacatgggtccgtttatgagcatcttgcaagagcatattggggcgatgaagaaggaagagctcacctcccatcagtctcagctaaccgcctttttcctggaggccctggacttccgagcccagcactctgagaacgatctggaggaagttggaaaaacggaaaattgtatcattgactgtctagtagccatggttgtcaaactttccgaggtcacattcaggcccctgttcttcaagctgtttgattgggctaaaacagaagatgccccaaaggacaggttgttgacattttacaacttggcagattgcattgctgaaaagctgaaagggctttttactctgtttgccggccacttagtgaagccttttgctgacaccttggaccaggtgaacatctccaaaacagatgaagcattttttgactctgaaaatgaccctgaaaagtgctgcttgctgttgcagtttattttgaactgtttatacaaaatcttcctttttgatacccagcattttataagtaaagagagagcaggagccttgatgatgcctctggtggatcagctggtaaacaggcttgggggagaagagaaattccaggaacgggtgacaaagcacctgataccatgcatcgcacagttttcagtggccatggcggatgactctctttggaaaccactgaactaccagattctgctaaagacgagagactcctcgcctaaggttcgatttgctgctttgattactgtgttagcactggctgaaaaactaaaggagaattatattgtcttgctaccagaatccattcctttcttagcagagttgatggaagatgaatgtgaagaagtagaacatcagtgccaaaagactattcagcaactggaaactgtcctgggagagccactccagagctatttctaagactttctgtggtgtttcatactctactcagagttcacactcatatttcatatttttatttttgggtgttgggtgccatgttacttttggtgccttaatacacctacttggattacttacaaatgttttatcacttcgttacaaaatccccacctggcttgtgctgccacataagcctctcctgcctatcgtatagagctgcagaaagagtaaatgatacacggtatttttatac

SEQ ID NO: 16 - DNA, 1702 bp, Homo sapiens
caaaatcccaggcagcatggacctcagtcttctctgggtacttctgcccctagtcaccatggcctggggccagtatggcgattatggatacccataccagcagtatcatgactacagcgatgatgggtgggtgaatttgaaccggcaaggcttcagctaccagtgtccccaggggcaggtgatagtggccgtgaggagcatcttcagcaagaaggaaggttctgacagacaatggaactacgcctgcatgcccacgccacagagcctcggggaacccacggagtgctggtgggaggagatcaacagggctggcatggaatggtaccagacgtgctccaacaatgggctggtggcaggattccagagccgctacttcgagtcagtgctggatcgggagtggcagttttactgttgtcgctacagcaagaggtgcccatattcctgctggctaacaacagaatatccaggtcactatggtgaggaaatggacatgatttcctacaattatgattactatatccgaggagcaacaaccactttctctgcagtggaaagggatcgccagtggaagttcataatgtgccggatgactgaatacgactgtgaatttgcaaatgtttagatttgccacataccaaatctgggtgaaaggaaaggggccggggacaggagggtgtccacatatgttaacatcagttggatctcctatagaagtttctgctgctctctttccttctccctgagctggtaactgcaatgccaacttcctgggcctttctgactagtatcacacttctaataaaatccacaattaaaccatgtttctcacttttcacatgtttcatagcaactgctttatatgactgatgatggcttccttgcacaccacatatacagtgcgcatgcttacagccgggcttctggagcaccagctgcagcctggctactgctttttactgcagaatgaactgcaagttcagcatagtggaggggagaggcagaactggaggagaggtgcagtgaaggttctctacagctaagcctgtttgaatgatacgtaggttccccaccaaaagcaggctttctgccctgagggacatcttcccactcccctgctccacatgagccatgcatgcttagcaatccaagtgcagagctctttgctccaggagtgaggagactgggaggtgaaatggggaaatggaagggtttggaggcagagctgaaaacagggttggaaggatttcctgaattagaagacaaacgttagcatacccagtaaggaaaatgagtgcaggggccaggggaacccgtgaggatcactctcaaatgagattaaaaacaaggaagcagagaatggtcagagaatgggattcagattgggaacttgtggggatgagagtgaccaggttgaactgggaagtggaaaaaggagtttgagtcactggcacctagaagcctgcccacgattcctaggaaggctggcagacaccctggaaccctggggagctactggcaaactctcctggattgggcctgatttttttggtgggaaaggctgccctggggatcaactttccttctgtgtgtggctcaggagttcttctgcagagatggcgctatctttcctcctcctgtgatgtcctgctcccaaccatttgtactcttcattacaaaagaaataaaaatattaacgttcact

SEQ ID NO: 17 - DNA, 2730 bp, Homo sapiens
agaatgcctatgagacacaggaagaaggcagcagacaagaatcttccctgccgtcctttagtatgtgcagtactggacctgatggtagagtttattgtaacacacatgatgaaggagtttcctatggatctctatatacgctgcatccaggtagtacacaaactgctctgctaccagaagaagtgtcgggtacgcctgcattacacctggcgggagctctggtcagccttgataaatttgctgaagttccttatgtcaaatgagactgtacttttggccaaacacaacatttttacattagcccttatgattgtgaacctatttaatatgtttatcacatatggcgacacatttctgccaacccccagcagctatgatgaactttactatgagattatccgcatgcaccagagctttgacaacctctactccatggtcctgaggctttctaccaatgcaggccagtggaaggaagcagctagcaaggtgacccatgcattggttaatatcagagccatcatcaaccactttaaccccaaaattgagtcctacgctgctgtgaatcacatatcccaactgtcagaggagcaggtgctggaggtggtgagagccaactatgacacgctcacgctgaagctgcaggatggcctggaccagtatgagcgctactcagagcagcacaaggaagctgccttcttcaaagagctggttcgatccattagcaccaacgtccggagaaacctggtcttccacacactcagccaagaagtcctgctcaaggagttctccactatctcctgaggccacgcctacctgagcagcctctgactgcccttacccatgaggatcatgggctggagggggagcgaggggagagggggctgcccccgaggttggagagaaacacagataccaagttctcttggtgaagaccgcacttcaatggagcttgggcagcaggggcaggagggtcaagccagggataatcttatttggggaggaatgggtgggcacagtggggagaggcctccaggaatgtggggacttccagagtgggctccctaaacagcccctcacatttccaatcttgaggttacaagctgtagctactgactaattttcgggagctggtgaggcaagcctcagggtaatgccagcaccctgaaagtcagtggctctgctcggcttctgaaaacagatcaactctcagatatagctggagctacatcctgcttcctttgggcctggggctgtgcttggcttgaaatctgtgtcccctgcctgcactggcactttgtccagtcatcgggacctttggctcagatttagggtaagataggaatagggtacctttttccttttttttctgagacggagtctcactctgtcgcccaggctggaatgcagtggcgtgatctcggctttactgcagcctccgcttcctgggttcaagcgattctcctgcctcagcctcccgagtagctgggactacaggagcgtgtgccacgcccggctaattttttgtatttttagtagagatggagtttcaccatgttacccaggatggtctcaatatcctgagttcatgatccacccaccttggcctcccaaagtgctgggattacaggcgtgagccaccacacccagccagttttcctattttctgaattcagaattgacttctctgggaaaactggagatgagaatctgcccagtgctctgctgtccagtcaccgccttttgaattttagttttggcaccaggagtaccgttagctttccccttcttctggcccatttgactcatcagcacaatagggtcaccaccttaacttttaatttctaatctgctttactgtctttagggtgtgtatgaaataaacattgacaggctttctggagccctcaaggtgcctactttgctggttccctttccagcagctcccccacctcccttagccccccctcctctggcagcctctcctgcctctgctgagctcccctccacgtgttccacccccttaccctgctgttgtttacatccaacctgcctgagaatttcctctggggaggaatctattcctgtcatggtctagtgcctgggagggagagaacttcctgggggtagggtgccctccatctgaaacaggccaggtgagcatcatgcataaggcctccattctgtccgctcagattctgggtggggccacaggcaaatctcctgacttatggggagttggcttgtggttcctcccttggatagcctccatggaaccactataggctttcccaacagctgcctctgaaatagctgctgcttcgagatcctccctttttaaagcactttctaaagccctcaggatggcgggagcaaacagcactggtatattctaggagtaagtgcaggaattcagcagtgagagcatgtctgggaccacctggactgccatccatttaacctcaaatctctttgggatactcgccctccctgggaaccagagttctggctctaacattgagcagctatgcactagttccagagaagccactaacaggctgccatgtgtagatgtaggttcttaagagatcacaggctgggtcatctgatcactggatggatagctcagcctggggcatttagtgttttccctggtgataaatccccaaggcagctggatttggagctggtggcaagttgaaattattaaaaattgatttgtgtgggactgtc

SEQ ID NO: 18 - DNA, 1972 bp, Homo sapiens
aggggttggccctggagtctgccagccacactgggaaaacattggagcttggtctgccatcctgaactgtggttcccctgcctcccagcccggctgtgagtgctcagcgaccctgacaggctgacagttgggccatatggtgctcttcccagtctggttcctgtacagtctgctcatgaagctgttccagcgctccacgccagccatcaccctcgagagcccggacatcaagtacccgctgcggctcatcgaccgggagatcatcagccatgacacccggcgcttccgctttgccctgccgtcaccccagcacatcctgggcctccctgtcggccagcacatctacctctcggctcgaattgatggaaacctggtcgtccggccctatacacccatctccagcgatgatgacaagggcttcgtggacctggtcatcaaggtttacttcaaggacacccatcccaagtttcccgctggagggaagatgtctcagtacctggagagcatgcagattggagacaccattgagttccggggccccagtgggctgctggtctaccagggcaaagggaagttcgccatccgacctgacaaaaagtccaaccctatcatcaggacagtgaagtctgtgggcatgatcgcgggagggacaggcatcaccccgatgctgcaggtgatccgcgccatcatgaaggaccctgatgaccacactgtgtgccacctgctctttgccaaccagaccgagaaggacatcctgctgcgacctgagctggaggaactcaggaacaaacattctgcacgcttcaagctctggtacacgctggacagagcccctgaagcctgggactacggccagggcttcgtgaatgaggagatgatccgggaccaccttccacccccagaggaggagccgctggtgctgatgtgtggccccccacccatgatccagtacgcctgccttcccaacctggaccacgtgggccaccccacggagcgctgcttcgtcttctgagggccgggcacggtcacacggccacccgccccgcgcaccccacgccctgttcacgctcacccagtcacctccccacatcgcacactggggccccgggttcagcctggcctgcccgtgccctggtgaatcacctggctgagcagttcccctggagccccttcgggagcagggctgtgtcccagatgggccacggctgagccttcagagtacgtcctgcctggcacttactggtccttaccagagacgcccagccccatccctgtcctcatgacccctcgtccaccccccacacacactataaggctgagggctgccagcagccccgtctgcccaccattcccggccgtggaccatagtcgggatgtcagcagacacacatgggcagcccaaagctgcaggtgccagggcccaccccagcctcgcctgtcacccccactcccgcctcagggccaggcccaggcctcaccacctgacgctgcatgagacattgacaccagaaagccctcttgggggcactgctccctaccccagggccctggccagccgggagcttggctctcctctggctagagtgggaagagggggctggccatggggccctcccagaacctcagcatttccttccagcccatccaaacactgaggcagccttggggaaccccgagctggggggttggcagcccactgcaccgcctcagggttttggggtcctgggctggggccaccatccctgatggcagaactcccacaaccacatgtatttattcctctgtcctaaaccgtcccctccttccctcacccccagcacagggggattctgagcagtgcctcttgtctgagggacatatcagtgacctcgacgttgcctttagactacagttgtgttagcctcttgcgtattggctttttcagagtcatttatgagcagaaaaaaaaaaagtaaaactttgctaatattaa

SEQ ID NO: 19 - DNA, 1852 bp, Homo sapiens
agcgcgcgactttttgaaagccaggagggttcgaattgcaacggcagctgccgggcgtatgtgttggtgctagaggcagctgcagggtctcgctgggggccgctcgggaccaattttgaagaggtacttggccacgacttattttcacctccgacctttccttccaggcggtgagactctggactgagagtggctttcacaatggaagggatcagtaatttcaagacaccaagcaaattatcagaaaaaaagaaatctgtattatgttcaactccaactataaatatcccggcctctccgtttatgcagaagcttggctttggtactggggtaaatgtgtacctaatgaaaagatctccaagaggtttgtctcattctccttgggctgtaaaaaagattaatcctatatgtaatgatcattatcgaagtgtgtatcaaaagagactaatggatgaagctaagattttgaaaagccttcatcatccaaacattgttggttatcgtgcttttactgaagccaatgatggcagtctgtgtcttgctatggaatatggaggtgaaaagtctctaaatgacttaatagaagaacgatataaagccagccaagatccttttccagcagccataattttaaaagttgctttgaatatggcaagagggttaaagtatctgcaccaagaaaagaaactgcttcatggagacataaagtcttcaaatgttgtaattaaaggcgattttgaaacaattaaaatctgtgatgtaggagtctctctaccactggatgaaaatatgactgtgactgaccctgaggcttgttacattggcacagagccatggaaacccaaagaagctgtggaggagaatggtgttattactgacaaggcagacatatttgcctttggccttactttgtgggaaatgatgactttatcgattccacacattaatctttcaaatgatgatgatgatgaagataaaacttttgatgaaagtgattttgatgatgaagcatactatgcagcgttgggaactaggccacctattaatatggaagaactggatgaatcataccagaaagtaattgaactcttctctgtatgcactaatgaagaccctaaagatcgtccttctgctgcacacattgttgaagctctggaaacagatgtctagtgatcatctcagctgaagtgtggcttgcgtaaataactgtttattccaaaatatttacatagttactatcagtagttattagactctaaaattggcatatttgaggaccatagtttcttgttaacatatggataactatttctaatatgaaatatgcttatattggctataagcacttggaattgtactgggttttctgtaaagttttagaaactagctacataagtactttgatactgctcatgctgacttaaaacactagcagtaaaacgctgtaaactgtaacattaaattgaatgaccattacttttattaatgatctttcttaaatattctatattttaatggatctactgacattagcactttgtacagtacaaaataaagtctacatttgtttaaaacactgaaccttttgctgatgtgtttatcaaatgataactggaagctgaggagaatatgcctcaaaaagagtagctccttggatacttcagactctggttacagattgtcttgatctcttggatctcctcagatctttggtttttgctttaatttattaaatgtattttccatactgagtttaaaatttattaatttgtaccttaagcatttcccagctgtgtaaaaacaataaaactcaaataggatgataaagaataaaggacactttgggtaccag

SEQ ID NO: 20 - DNA, 2883 bp, Homo sapiens
ccgggtgggctccaggcggccggtccccggcctccccccatggccaccgccccctcttatcccgccgggctccctggctctcccgggccggggtctcctccgccccccggcggcctagagctgcagtcgccgccaccgctactgccccagatcccggccccgggttccggggtctcctttcacatccagatcgggctgacccgcgagttcgtgctgttgcccgccgcctccgagctggctcatgtgaagcagctggcctgttccatcgtggaccagaagttccctgagtgtggcttctacggcctttacgacaagatcctgcttttcaaacatgaccccacgtcggccaacctcctgcagctggtgcgctcgtccggagacatccaggagggcgacctggtggaggtggtgctgtcggcctcggccaccttcgaggacttccagatccgcccgcacgccctcacggtgcactcctatcgggcgcctgccttctgtgatcactgcggggagatgctcttcggcctagtgcgccagggcctcaagtgcgatggctgcgggctgaactaccacaagcgctgtgccttcagcatccccaacaactgtagtggggcccgcaaacggcgcctgtcatccacgtctctggccagtggccactcggtgcgcctcggcacctccgagtccctgccctgcacggctgaagagctgagccgtagcaccaccgaactcctgcctcgccgtcccccgtcatcctcttcctcctcttctgcctcatcgtatacgggccgccccattgagctggacaagatgctgctctccaaggtcaaggtgccgcacaccttcctcatccacagctatacacggcccaccgtttgccaggcttgcaagaaactcctcaagggcctcttccggcagggcctgcaatgcaaagactgcaagtttaactgtcacaaacgctgcgccacccgcgtccctaatgactgcctgggggaggcccttatcaatggagatgtgccgatggaggaggccaccgatttcagcgaggctgacaagagcgccctcatggatgagtcagaggactccggtgtcatccctggctcccactcagagaatgcgctccacgccagtgaggaggaggaaggcgagggaggcaaggcccagagctccctggggtacatccccctaatgagggtggtgcaatcggtgcgacacacgacgcggaaatccagcaccacgctgcgggagggttgggtggttcattacagcaacaaggacacgctgagaaagcggcactattggcgcctggactgcaagtgtatcacgctcttccagaacaacacgaccaacagatactataaggaaattccgctgtcagaaatcctcacggtggagtccgcccagaacttcagccttgtgccgccgggcaccaacccacactgctttgagatcgtcactgccaatgccacctacttcgtgggcgagatgcctggcgggactccgggtgggccaagtgggcagggggctgaggccgcccggggctgggagacagccatccgccaggccctgatgcccgtcatccttcaggacgcacccagcgccccaggccacgcgccccacagacaagcttctctgagcatctctgtgtccaacagtcagatccaagagaatgtggacattgccactgtctaccagatcttccctgacgaagtgctgggctcagggcagtttggagtggtctatggaggaaaacaccggaagacaggccgggacgtggcagttaaggtcattgacaaactgcgcttccctaccaagcaggagagccagctccggaatgaagtggccattctgcagagcctgcggcatcccgggatcgtgaacctggagtgcatgttcgagacgcctgagaaagtgtttgtggtgatggagaagctgcatggggacatgttggagatgatcctgtccagtgagaagggccggctgcctgagcgcctcaccaagttcctcatcacccagatcctggtggctttgagacaccttcacttcaagaacattgtccactgtgacttgaaaccagaaaacgtgttgctggcatcagcagacccatttcctcaggtgaagctgtgtgactttggctttgctcgcatcatcggcgagaagtcgttccgccgctcagtggtgggcacgccggcctacctggcacccgaggtgctgctcaaccagggctacaaccgctcgctggacatgtggtcagtgggcgtgatcatgtacgtcagcctcagcggcaccttccctttcaacgaggatgaggacatcaatgaccagatccagaacgccgccttcatgtacccggccagcccctggagccacatctcagctggagccattgacctcatcaacaacctgctgcaggtgaagatgcgcaaacgctacagcgtggacaaatctctcagccacccctggttacaggagtaccagacgtggctggacctccgagagctggaggggaagatgggagagcgatacatcacgcatgagagtgacgacgcgcgctgggagcagtttgcagcagagcatccgctgcctgggtctgggctgcccacggacagggatctcggtggggcctgtccaccacaggaccacgacatgcaggggctggcggagcgcatcagtgttctctgaggtcctgtgccctcgtccagctgctgccctccacagcggttcttcacaggatcccagcaatgaactgttctagggaaagtggcttcctgcccaaactggatgggacacgtggggagtggggtggggggagctatttccaaggcccctccctgtttccccagcaattaaaacggactcatctctggccccatggccttgatctcagca

SEQ ID NO: 21 - DNA, 1463 bp, Homo sapiens
cgcccctgacaccattcctcccttcccccctccaccggccgcgggcataaaaggcgccaggtgagggcctcgccgctcctcccgcgaatcgcagcttctgagaccagggttgctccgtccgtgctccgcctcgccatgacttcctacagctatcgccagtcgtcggccacgtcgtccttcggaggcctgggcggcggctccgtgcgttttgggccgggggtcgcctttcgcgcgcccagcattcacgggggctccggcggccgcggcgtatccgtgtcctccgcccgctttgtgtcctcgtcctcctcgggggcctacggcggcggctacggcggcgtcctgaccgcgtccgacgggctgctggcgggcaacgagaagctaaccatgcagaacctcaacgaccgcctggcctcctacctggacaaggtgcgcgccctggaggcggccaacggcgagctagaggtgaagatccgcgactggtaccagaagcaggggcctgggccctcccgcgactacagccactactacacgaccatccaggacctgcgggacaagattcttggtgccaccattgagaactccaggattgtcctgcagatcgacaatgcccgtctggctgcagatgacttccgaaccaagtttgagacggaacaggctctgcgcatgagcgtggaggccgacatcaacggcctgcgcagggtgctggatgagctgaccctggccaggaccgacctggagatgcagatcgaaggcctgaaggaagagctggcctacctgaagaagaaccatgaggaggaaatcagtacgctgaggggccaagtgggaggccaggtcagtgtggaggtggattccgctccgggcaccgatctcgccaagatcctgagtgacatgcgaagccaatatgaggtcatggccgagcagaaccggaaggatgctgaagcctggttcaccagccggactgaagaattgaaccgggaggtcgctggccacacggagcagctccagatgagcaggtccgaggttactgacctgcggcgcacccttcagggtcttgagattgagctgcagtcacagctgagcatgaaagctgccttggaagacacactggcagaaacggaggcgcgctttggagcccagctggcgcatatccaggcgctgatcagcggtattgaagcccagctgggcgatgtgcgagctgatagtgagcggcagaatcaggagtaccagcggctcatggacatcaagtcgcggctggagcaggagattgccacctaccgcagcctgctcgagggacaggaagatcactacaacaatttgtctgcctccaaggtcctctgaggcagcaggctctggggcttctgctgtcctttggagggtgtcttctgggtagagggatgggaaggaagggacccttacccccggctcttctcctgacctgccaataaaaatttatggtccaaggg

SEQ ID NO: 22 - DNA, 2309 bp, Homo sapiens
cgcgctggagaggcgcggggtcaagacgtccggcctcgggggcccgggctgggccgccgagtcccctgggcggcgctgagcgggcgggaggcgggggcccgcggctcggggcaaccgaggccgggtcgcgggatcggccgccatcgccgccgccgctgcactgggagcccgcggggatggagcgggaggcgttgccgtggggcctcgagccccaggatgtgcagagttctgacgaaatgaggagccccgaagggtacctcagaggcaacatgagtgagaatgaggaagaggaaatttctcagcaagaaggcagtggggactatgaagtcgaagagataccatttgggcttgaaccccagagccctgggtttgagccacaaagcccagagtttgaaccccaaagccccagatttgagcctgaaagcccggggtttgagtcccgaagccctgggcttgtgcccccaagccctgagtttgcacccagaagccctgaatcagattctcagagccctgagtttgaatcccagagccctaggtatgaaccccaaagccctggctatgaacctcggagccccgggtatgaaccccggagccctggctatgaatctgagagctctagatatgaatcccagaacactgagctcaaaacccaaagcccagaatttgaagctcaaagttccaaattccaggaaggtgcggagatgcttctgaaccccgacgaaaagagtcctttgaatatctccgtaggagttcaccccctggactccttcactcaggggtttggggagcagcccacaggggacctgcccatagggccaccttttgagatgcccacaggggccctgctgtctacaccgcagtttgagatgcttcagaatcccctgggtctcacaggagcccttcgaggtccaggtcggcggggtggccgggccaggggtgggcagggccctcggcctaacatctgcggcatctgcgggaagagcttcgggcggggctccaccctgatccagcaccagcgcatccacaccggtgagaagccctacaaatgtgaggtctgcagcaaggccttctcccagagctctgacctcatcaaacaccagcgcacccacactggcgagcggccctacaaatgtccccgttgcggcaaggccttcgccgacagctcttacctgcttcgccaccagcgcactcactctggccagaagccctacaagtgcccacattgtggcaaggccttcggcgacagctcctacctcctgcgacaccagcgcacccacagccacgagcggccctacagctgcaccgagtgcggcaagtgctatagccagaactcgtccctgcgcagccatcagagggtgcacaccggtcagaggcccttcagctgtggcatctgcggcaagagcttctcccagcggtcggcccttatcccccatgcccgcagccacgcccgggagaagcccttcaagtgccctgagtgcggcaagcgctttggccagagctcggtgctggccatccacgcccgcacccacctgccaggccgcacctacagctgccccgactgcggcaagaccttcaatcgctcctccactctcatccagcaccagcgctcccacacgggcgagcggccctacaggtgcgccgtgtgcggcaagggcttctgccgctcctccacgcttctgcagcatcaccgggtccacagtggcgagcggccttacaagtgcgatgactgcggaaaggccttctcccagagctccgacctcatccgccaccagcggacccacgcggcgggccggcgctgacctggggccccagcaggggtgggaggtgtgggcagaagataaggggccagggagctagaggaacctttagggaggatagtggagaagccgcaggagaatggaggagctgaggatgctggaagaagagaaccagggtggaggaagtgacatgccctggagacttgtgggaagtgggttggagggaggccaggccggcagcgggaggccctgggagaaatggagagaggtcagcggagggctggcctcagccgcggctccttggtgggtgcctggcttggcaactgctagagcagggaggggggagggcaggggattacctaattagagtgggttagcttagattggtagctgctgaaactctcgttgagtcaggagcgggtaaaaggtaggtggggtggggagtggggccccggggtggggcctgggcctctgcgtgcaaaccccagcctccctcttcttcctcaggctttggagcccctgagtttgagttcaataaaaactttatgtggt

SEQ ID NO: 23 - DNA, 1853 bp, Homo sapiens
cacagggactgcgctcccttgcccctagcgctcccgcgctgctgctccagccgcccggcagctctgaggatggagaggagggcgcggagctcctccagggagtcccgcgggcgaggcggcaggactccgcacaaggagaacaagagggcaaaggccgagaggagcggcgggggccgcgggcgccaggaggctgggcccgagccgtcgggctccggacgggcggggaccccgggggagccccgagcgcccgccgccacggtggtggacgtggatgaggtccgaggctccggcgaggagggcaccgaggtggtggcgctgttggagagcgagcggcccgaggaaggtaccaaatcctccggcttaggggcctgtgagtggcttcttgtcctcatttccctgctcttcatcatcatgaccttccctttttccatctggttctgcgtaaaggttgtacaagagtatgaaagagtaattatattccgactgggacatctgcttcctggaagagccaaaggccctggtcttttcttttttttgccctgcctggatacctaccacaaggttgaccttcgtctccaaactctggagataccttttcatgagatcgtgaccaaagacatgtttataatggagatagatgccatttgctactaccgaatggaaaatgcctctcttctcctaagcagtcttgctcatgtatctaaagctgtgcaattccttgtgcaaaccactatgaagcgtctcctagcacatcgatccctcactgaaattcttctagagaggaagagcatcgcccaagatgcaaaggttgccttggattcagtgacctgtatttggggaatcaaagtggagagaatagaaattaaagatgtgaggttgccagctgggcttcagcactcactggctgtggaggctgaagcgcaaagacaagccaaagtgcggatgattgctgcagaagcggaaaaggctgcttctgagtccctgaggatggcagctgagattctgtcaggcacccctgctgctgttcagcttcgatacctccacacccttcagtctctgtccacagagaagccttccactgtggttttacctttgccatttgacctactgaattgcctgtcttctcccagcaacagaactcagggaagcctccccttcccaagtccttccaaacctgttgagccactaaatcctaaaaagaaagactctcccatgttataggaaggatggggcataatgtgactgtaaaggggcctgccatagaaaagtcacatccctgagggagacactctgtcctcattccctgcccttcctttggttgccatatggaatggccatggaatgcacgaagtcacaatgcaccatccatgagaagacagtgaaatgatgtaatgacagagaaggcagacaacatgtttccgtgactcatctagtcagagcaattatgggaaacagctttggtcaacattctactttggaaagaattttgagtctagatgtggttaaattttgacttctgggaacttggttcagatgtccctttcactgtatgtcctctgacccctttggcaaggttgccacagctcccacagcccttcctacaagcacctatcattgggcttgtcacactctattgctcttctgtcccgaagatgcagtcttctctccaatgatactaccaagtcttagttttcctcaaccacactcaatctttttgctccaccctgaattcctcacacctaaccctgatagttacctaaagtgacacttaaatgtttcagagtgaatgcaaaaaagagagatgtacttggagtcggatatacaatttatccctaattaaagcatttaaaagg

SEQ ID NO: 24 - DNA, 765 bp, Homo sapiens
ggcaagcactttaaccttttaagcccaaccagatgagttgcctgcagttttggaggccttcagagcatttcactagacctctgtctgtgtcggtccagtgtctttagccaagctttgattaaagatgacttccttgtttgctcaagaaattcgcctttctaaaagacatgaagaaatagtatcacaaagattaatgttacttcaacaaatggagaataaattgggtgatcaacacacagaaaaggcatctcaactccaaactgttgagactgcttttaaaaggaaccttagtcttttaaaggatatagaagcagcagaaaagtcactacagaccaggattcacccacttccacggcctgaggtggtttctcttgagactcgttactgggcatcagtagaagaatatattcccaaatgggaacagtttcttttaggaagagcaccatatccttttgctgttgaaaatcaaaatgaagcagaaaataccattcaaaatgaggcacagcgataacttcttcacatgctatttcaaaaagcctgtttaataaagctgaatgttaaggtgtatgtaggttattgcaggaactttaggaattaaatatgttcatattcttcgattatctcctaagtgacagtgaagatatgagaatttactggcaagtcacatgttatcacctactactatttcaaggtcatgaatttgctttctaccaaacccatagatgtgttaaacacgaatattaaaaggtggactctttattaatt

SEQ ID NO: 25 - DNA, 2448 bp, Homo sapiens
acgtcccagcgtctgagagaacgagtaagcacagaattcaaagcattctgcagcctgaattttgaaggagtgtgtttaggcactaagcaagctgatttatgataactgctttaaacttcaacaaccaaaggcataagaactaggagctgctgacatttcaatatgaagggcaactccacccttgccactactagcaaaaacattaccagcggtcttcacttcgggcttgtgaacatctctggcaacaatgagtctaccttgaactgttcacagaaaccatcagataagcatttagatgcaattcctattctttactacattatatttgtaattggatttctggtcaatattgtcgtggttacactgttttgttgtcaaaagggtcctaaaaaggtttctagcatatacatcttcaacctcgctgtggctgatttactccttttggctactcttcctctatgggcaacctattattcttatagatatgactggctctttggacctgtgatgtgcaaagtttttggttcttttcttaccctgaacatgtttgcaagcattttttttatcacctgcatgagtgttgataggtaccaatctgtcatctacccctttctgtctcaaagaagaaatccctggcaagcatcttatatagttccccttgtttggtgtatggcctgtttgtcctcattgccaacattttattttcgagacgtcagaaccattgaatacttaggagtgaatgcttgcattatggctttcccacctgagaaatatgcccaatggtcagctgggattgccttaatgaaaaatatccttggttttattatccctttaatattcatagcaacatgctattttggaattagaaaacacttactgaagacgaatagctatgggaagaacaggataacccgtgaccaagtcctgaagatggcagctgctgttgttctggccttcatcatttgctggcttcccttccatgttctgaccttcctggatgctctggcctggatgggtgtcattaatagctgcgaagttatagcagtcattgacctggcacttccttttgccatcctcttgggattcaccaacagctgcgttaatccgtttctgtattgttttgttggaaaccggttccaacagaagctccgcagtgtgtttagggttccaattacttggctccaagggaaaagagagagtatgtcttgccggaaaagcagttctcttagagaaatggagacctttgtgtcttaaacgtgagagcaaaatgcatgtaatcaacatggctacttgctttgaggctcaccagaattatttttaagtggttttaataaaataataaaatttcccctaatcttttctgaatcttctgaaaccaaatgtaactatgttttatcgtccagtgactttcaggaattgcccattgtttttctgatatgtttgtacaagatttcattggtgagacatatttacaacctagaagtaactggtgatatatctcaaattgtaattaataatagattgtgaataatgatttggggattcagatttctctttgaaacatgcttgtgtttcttagtggggttttatatccatttttatcaggatttcctcttgaaccagaaccagtctttcaactcattgcatcatttacaagacaacattgtaagagagatgagcacttctaagttgagtatattataatagattagtactggattattcaggctttaggcatatgcttctttaaaaacgctataaattatattcctcttgcatttcacttgagtggaggtttatagttaatctataactacatattgaatagggctaggaatatagattaaatcatactcctatgctttagcttatttttacagttatagaaagcaagatgtactataacatagaattgcaatctataatatttgtgtgttcactaaactctgaataagcactttttaaaaaactttctactcattttaatgattgtttaaaggtttctattttctctgatacttttttgaaatcagtaaacactgtgtattgttgtaaaatgtaaaggtcacttttcacatccttgactttttagatgtgctgctttgatatataggacattgatttgatttttattattaatgctttggttctgggttgtttcctaaaatatctgggtggcttaaaaaaaactctttaacttgtaataaacccttaactggcataggaaatggtatccagaatggaattttgctacatggggtctgggtgggggcaaagagacccagtcaattacatgtttggtaccaagaaaggaacctgtcagggcagtacaatgtgactttgaaaatatataccgtgggggtagttttaccctatatctataaacactgtttgttccagaatctgtatgattctatggagctattttaaaccaattgcaggtctaga

SEQ ID NO: 26 - DNA, 1101 bp, Homo sapiens
atggatttcttaaattcatctgatcaaaacttgacctcagaggaactgttaaacagaatgccatccaaaattctggtgtccctcactctgtctgggctggcactgatgacaacaactatcaactcccttgtgatcgctgcaattattgtgacccggaagctgcaccatccagccaattatttaatttgttcccttgcagtcacagattttcttgtggctgtcctggtgatgcccttcagcattgtgtatattgtgagagagagctggattatggggcaagtggtctgtgacatttggctgagtgttgacattacctgctgcacgtgctccatcttgcatctctcagctatagctttggatcggtatcgagcaatcacagatgctgttgagtatgccaggaaaaggactccaaagcatgctggcattatgattacaatagtttggattatatctgtttttatctctatgcctcctctattctggaggcaccaaggaactagcagagatgatgaatgcatcatcaagcacgaccacattgtttccaccatttactcaacatttggagctttctacatcccactggcattgattttgatcctttactacaaaatatatagagcagcaaagacattataccacaagagacaagcaagtaggattgcaaaggaggaggtgaatggccaagtccttttggagagtggtgagaaaagcactaaatcagtttccacatcctatgtactagaaaagtctttatctgacccatcaacagactttgataaaattcatagcacagtgagaagtctcaggtctgaattcaagcatgagaaatcttggagaaggcaaaagatctcaggtacaagagaacggaaagcagccactaccctgggattaatcttgggtgcatttgtaatatgttggcttcctttttttgtaaaagaattagttgttaatgtctgtgacaaatgtaaaatttctgaagaaatgtccaattttttggcatggcttgggtatctcaattcccttataaatccactgatttacacaatctttaatgaagacttcaagaaagcattccaaaagcttgtgcgatgtcgatgttag

SEQ ID NO: 27 - DNA, 6103 bp, Homo sapiens
atccggggcagcggggaatggctgagccaggggttcgccgcccccgccgccgccgccgccgccgccgccgccgccgccgcccgctttcggctcgggcctcaggaccgtagcatcctgagacattttgaattgacacttctcaagatttgactggatcagagttcatcatgtcaaagttgaaaagctcagagtcagtcagggtggtggttcgctgtcggcccatgaatggcaaggaaaaggctgcttcgtatgacaaagtggtggatgtggatgttaagctggggcaggtgtctgtgaagaaccccaaagggacggcccatgaaatgcccaagaccttcacctttgatgccgtctatgactggaatgccaagcagtttgaactgtacgatgagacgttccgaccacttgttgactctgtcctgcaaggtttcaatggaaccatttttgcctatggacaaactgggacaggaaaaacctacaccatggaaggaatccgtggtgaccctgaaaaaagaggagtcattcctaactcatttgaccatatcttcacccacatctctcgatcccagaatcaacaatacctggtcagggcttcttacttagagatctaccaggaggagatccgagatttgctctcaaaggatcagaccaaaaggcttgagctcaaagagaggcctgacacaggagtgtatgtgaaagacctgtcttcctttgtcaccaagagtgtgaaggagatagagcatgtgatgaatgtggggaaccagaaccgttctgtcggtgctaccaacatgaacgagcacagctcgcgttctcatgcaattttcgttatcactattgagtgcagcgaggtgggcctcgatggtgaaaaccacatccgtgtaggaaaattgaaccttgtagatcttgctggcagcgaacggcaagccaagaccggcgcacaaggggagagattaaaagaagctaccaagatcaacctctccctttccgctttgggtaatgtcatctctgctctagtggacggcaaaagcactcacattccatatcgggactcaaagcttaccaggctcctccaagattcccttggtggcaatgccaagactgtgatggtggccaacgtggggcctgcctcttacaacgtagaagagactctgaccactctgcgatatgccaaccgtgccaaaaacattaagaacaaaccaagggtcaatgaggaccccaaggatgccctccttcgagaattccaggaagagattgctcggctcaaggcccagctggaaaaacggtccattggtaggaggaagaggcgagagaagcggagggaaggtggtggcagtggtgggggtggggaagaggaggaggaggagggagaagagggtgaggaggaaggggatgataaggatgattactggcgggaacagcaagaaaaactggagattgagaagcgggccattgtagaggatcacagcttggttgcagaggagaagatgaggctgctgaaggagaaagagaaaaagatggaggacctgcggcgggagaaggatgctgccgagatgctgggcgccaagatcaaggccatggagagtaagttgcttgttggaggaaaaaatatagtagatcatacgaatgaacagcagaaaatcctggagcagaaacgacaggaaattgcagagcagaaacgtcgagaaagagaaatccagcaacagatggaaagtcgagatgaggagaccttggaacttaaagagacatacagctcattgcagcaagaggtggacatcaagaccaaaaaactcaaaaagctcttctccaagcttcaggcagtgaaggctgagatccatgacctccaagaagaacacatcaaggagcgccaagagctagagcagactcagaatgagctcaccagggagctgaaactcaagcatcttattatagaaaactttatccctctggaagaaaaaagtaaaattatgaatagagccttctttgatgaagaggaagatcattggaaactacatcctataaccagactggagaaccagcagatgatgaagcggccagtctcagccgtgggatataagagaccattgagccagcacgcaagaatgtccatgatgattcgtccagaggcccgatatagggcagaaaacattgtgctgttagagctggacatgcccagccggaccaccagagactatgagggtccagccattgcccccaaggtccaggctgcattggatgcggctctgcaggatgaagatgagatacaggtggatgcatcatcatttgaaagcactgcaaataagaaatccaaggccaggcctaaaagtggaaggaagtcgggatcctcctcctcttcctcaggaacccctgcatctcagctttatccacagtctcgggggctggttccaaagtaaagccagcttctcctctcccagggcggaaacagcatttgccttctgagagaagagactagcaaaaagctgcagagaggattcggcccaaactcagaactgttcccctgaggagaagcggtggcctctttgcagatcaaccaacttaatctggttgaacgtgctgttcctaatctggcactcagcccctctgggaaacatcttttaattagcatctcagaaatgcatgggtaaggtaaagtgcgatagttcaagtggaaagcaagagaatgaccagtgaccttgcttccttcccccttgccttcttctcccccttcccctgtgctccctttctctcctctctccttttctagcctgttctttacatggggctcccttcttgttgaacaatagggcagaatcaggagtcaccttagcaggaccacatctttggagcctcgggataaaatgacagtgaggttgaaaagtgaaaaccctagaacttgaataggtgcctgttcttgtagggagaaatgagaaatcgcatttggatccaggccccaggtgggcaccatcagcagtcttgcttccatgcacctcagtaagaagtggatctgcctttgggacctgctcagtgaggaaatctcttccaatttctgcttctgaatgattcaatgttgggagcaatagaaataacattccctttgccttctctgagtgtttagggaaatagcttctttaaaacctcaaaaccatgaccatcctgtcaaagacctaagtctgtaagctggtgccatgtccatacaccatgtcactttactcttcatttgtcaccatcttttcccatgcacgcatactctgaacatccttgtgtgggcccatcctctgcatccagagcatgctctgcagtgggcctgttttgtggaagaaaggaggctgtctctgccttctctgatgggactggagttgagggaaggagctgtattgtggcacttctgaattccccgttttgttccatattggtatagagagcagaagagtagctaggcagatgcagagatggagacatgagactcagtgcagtgggcagggaagacataacagatggaagcaaaggaatcctgcctgccttcagcagagaattcaccgaatcctagaactgtggctccctccaggcagagcctaagatgctggtgaagaatagctgtgtgattgaataggctcaaaggagagttcagaattcccatttacatattactagtttggtttgtaagttttagttccttgtattattgagattcagagcttcattttatgttggtcattaggtgaatattactcattttccctcaagagaagctcataagtgtgtgtgggtgtgagagcacgatggtgcctgtgttctgtgaatgtgtccatatgtgtctgtaagagagacagagaccaagaacttgcccaattttagaaatacactaatgtgcagttgttgccttttgtctgtattgaaggcccattgaatgactaatccaggctggaagcattcccatgtgggtgtctgagtccatgagccaagcctgaggggacagtgagtctccaggtctgccacactggtgcaccttgctggcacggtgcctcaggaaggtggcgactcaggtgggccttgagttatattttaactcagctgctcagttcccagggcacatttctggatcagaacccatgggaaacaggaggtactaagtgcaatgtcttagcattctgcaaaatggagatctgttgtccagcggcttatctcctttttagtaacccttctttctgaacccagggcccttttcagccttccctcatattttcttgagatcaaactttacttctttcttatttactaagaatttgcctgtttgaataagaacaaaacgctaaggtgggtagcctaagctgattttctgctggttacacgtgtctctcacaccacatttcctcaaagctaatctgaattctgtaggctaaaaatattcatgtagcaaatctgagaattgaaaactgcagataaccggccgggtatggtgactcatgcctgtaatcctagcactttgggaggccgaggtgggtggaccacctgaggttaggacttcaagaccagcctggccaacatggtgaaaccccatctgtactaaaaatacaaaaatttgcctggtgtggtggtgcatgcctctagtcctagctactcgggaggctgaggcacgagaatcacttgaacctgggaggcggaggttgcagtgagtcgagataacactactgcattccagcctgggtgacagagtgagactccacctcaaaaaaaaaaaaaaaaaaaaaaaaaacagaaagaaagaaaaagaaaactgcagataaccctatacattaatactggtatctcgaggtgactcttctgaccaagggtggttaagtgacacatagaacttttctaagagaagacagacaagttgacaggcatgccttgtactcagctgtgttcatgtggtggtctgtggaaagaaaagaagactcatttggaaatgaagctgtccctttccaagcagtctctggtgcttttcttctctcaaaatggatccgataaatatttgaatagagcagattgtagaatgtcgtgctgtcaccagaaagctgctgttttgggttctgcattgagccaaatatgtagaggacctaccaagcccactgagggactaggttttcatgtctctagtcatacctagaatgttctgagccgtctgagggccttcatgccggcagcagctagcaaagccagaaagcaagtctaacaggatctaagatgaccatcaggagaaggagtttgagactgtgtatgcaacccccaatagacccccttttactctgatctggagaatgtatctggcttcatattttcaagtcacatgtctctcagacccctggattcagaacccaaggccacaaatcataggcatgaagcactttcttaagactgacctaacgctggattatttcccgtccaatgcctgcatgctgcttgaattgctccacccacacctccatgaccaagggcgccagagtgctgcaactggggcgtgggccgctctctgcttttcctgtctgactctgacaagtcctccctcactgaatgtagaatcgttgccaagtttctgagaagtgtcgattccctgttaacatggatatcagttctgcctcacatttcccacttgaggttgaggcgtactggagacaacacctcagaccatctgaaccccatcagtggacgaaaatggggctgttaatatactctaaaagccatactaaaaatgctctgagggaactggctaagaatagtgggcctggtgattgtctatcacgcaaggctttgttttgtactgttcagaaatctgtcacctttctgcctgcccttgtttcctgaatgaaatgcttctggggttatttatgaaaggagtgatcctggggcaggcaggaggcagtgggcttcatggctccttgaagttattactgatcttgaccttctctttggctacctttagacaaagaatacgccaatcaatacttggggctctaagttttacaattgatatttatttgtatcatctctttgtctaggaatgtaaaagtgattctaaactaagatgtgtaataaaaatcaatcagatttattgtacctacaaaaa

SEQ ID NO: 28 - DNA, 1318 bp, Homo sapiens
atgaaggccactatcatcctccttctgcttgcacaagtttcctgggctggaccgtttcaacagagaggcttatttgactttatgctagaagatgaggcttctgggataggcccagaagttcctgatgaccgcgacttcgagccctccctaggcccagtgtgccccttccgctgtcaatgccatcttcgagtggtccagtgttctgatttgggtctggacaaagtgccaaaggatcttccccctgacacaactctgctagacctgcaaaacaacaaaataaccgaaatcaaagatggagactttaagaacctgaagaaccttcacgttgtctaccttcataacaacaatatctctgtagttggatcaagtgacttctgcccacctggacacaacaccaaaaaggcttcttattcgggtgtgagtcttttcagcaacccggtccagtactgggagatacagccatccaccttcagatgtgtctacgtgcgctctgccattcaactcggaaactataagtaattctcaagaaagccctcatttttataacctggcaaaatcttgttaatgtcattgctaaaaaataaataaaagctagatactggaaacctaactgcaatgtggatgttttacccacatgacttattatgcataaagccaaatttccagtttaagtaattgcctacaataaaaagaaattttgcctgccattttcagaatcatcttttgaagctttctgttgatgttaactgagctactagagatattcttatttcactaaatgtaaaatttggagtaaatatatatgtcaatatttagtaaagcttttcttttttaatttccaggaaaaaataaaaagagtatgagtcttctgtaattcattgagcagttagctcatttgagataaagtcaaatgccaaacactagctctgtattaatccccatcattactggtaaagcctcatttgaatgtgtgaattcaatacaggctatgtaaaatttttactaatgtcattattttgaaaaaataaatttaaaaatacattcaaaattactattgtatacaagcttaattgttaatattccctaaacacaattttatgaagggagaagacattggtttgttgacaataacagtacatcttttcaagttctcagctatttcttctacctctccctatcttacatttgagtatggtaacttatgtcatctatgttgaatgtaagcttataaagcacaaagcatacatttcctgactggtctagagaactgatgtttcaatttacccctctgctaaataaatattaaaactatcatgtg

SEQ ID NO: 29 - DNA, 1313 bp, Homo sapiens
ggggggcgcagcaggccagggcaacccgccgcgaggcggcgtccacgccgaggagccgcgcattcccggtccacacagacgcggcggagcgccctcccaggcgggactacaactcaatgcctggcacgggggcgggctcggcggtgacttaatccgggctgagtttggtggtggtagtgagggcaggtaggggcactgcccattttggccaagggtcacacagcatctacatcacaattgcaccggagtttaaaaatgtctggccctgtccctccccaccacccgccgctgtgtccagacagagaatgttctaacgctgggggcggctgcggatgaagtccttggggagaaaaggagcaggccaagggcgatggtggagtagagctgcctctcagaggcagcatgagctgagagggtgataggaaggcggcgctagacagcatggaggactttctgctctccaatgggtaccagctgggcaagaccattggggaagggacctactcaaaagtcaaagaagcattttccaaaaaacaccaaagaaaagtggcaattaaagttatagacaagatgggagggccagaagagtttatccagagattcctccctcgggagctccaaatcgtccgtaccctggaccacaagaacatcatccaggtgtatgagatgctggagtctgccgacgggaaaatctgcctggtgatggagctcgctgagggaggggatgtctttgactgcgtgctgaatggggggccactgcctgaaagccgggccaaggccctcttccgtcagatggttgaggccatccgctactgccatggctgtggtgtggcccaccgggacctcaaatgtgagaacgccttgttgcagggcttcaacctgaagctgactgactttggctttgccaaggtgttgcccaagtcacaccgggagctgagccagaccttctgcggcagtacagcctatgctgcccccgaggtgctgcagggcattccccacgatagcaaaaaaggtgatgtctggagcatgggtgtggtcctgtatgtcatgctctgtgccagcctaccttttgacgacacagacatccccaagatgctgtggcagcagcagaagggggtgtccttccccactcatctgagcatctcggccgattgccaggacctgctcaagaggctcctggaacccgatatgatcctccggccttcaattgaagaagttagttggcatccatggctagcaagcacttgataaaagcaatggcaagtgctctccaataaagtagggggagaaagcaaacccaaaaacccgcttct

SEQ ID NO: 30 - DNA, 3401 bp, Homo sapiens
atgaggaggtcgctgagagctgggaagaggcggcagacagcggggaaatccaaatctcctcccaaagtgcccattgtgattcaggacgatagccttcccgcggggccccctccacagatccgcatcctcaagaggcccaccagcaacggtgtggtcagcagccccaactccaccagcaggcccacccttccagtcaagtccctagcacagcgagaggccgagtacgccgaggcccggaagcggatcctgggcagcgccagccccgaggaggagcaggagaaacccatcctcgacaggccaaccaggatctcccaacccgaagacagcaggcagcccaataatgtgatcagacagcctttgggtcctgatgggtctcaaggcttcaaacagcgcagataaatgcaggcaagaaaagatgccgccgttgctgccgtcaccgcctcctgggtcgtccgccacgggttgcactgccgtggcagacagctggacttgagcagagggaacgacctgacttacttgcactgtgatcccccttgctccgcccactgtgaccttgaaccccatgcactgtgacctccccccttctcccccttcccactgtgattggcacatcgacaagggctgtcccaagtcaatggaaagggaaagggtgggggttaggggaaggttggggggacccagcaaggactcagagagtcagacagtgccacttggccacttggggtaaagccagtgccagcaataacagtttatcatgctcattaatttgggatttcaaaacacaaatgaaaactcacacccacccacccccaagtgcatgtctccatcacttaaaaagtaagttccatttgaaaatatcctttcttttttttttcttcctatttttgtttgtttatacaaatatctgatttgcaagaaaaagtgcatgggaggggttttagtggtttaatgaatttttaattaagaaagggtagtttggtagtctacttaaaaatgtttctgggaaattcactagaaacattaaccaataggattttggtgagcttagcttctgtattcctactgccgcccagaaaaggggcagggctctgcagccgccaggacagacgagcaccccatgcctatacctccctccccgagctaagtcccagggcatctgggccttgcctggagactgggctagctctgtaggctcggagagcctggggagggtgccaaccccacctctagtattttgggagatagggaaagtgaaccgacttccccttcccatacccctcagggtggttccctaccagccaggcttactacttctagaagaaagcagagtgccagggagtgagattgcatccctgggcttagaagtgacggagagaagacttgtttagtattttgccatcagcacaaggaaaaccaggagagagtctgcctccaggactctgagccttctgcctcatatgttcagaaggtggataggtcttcccactccagcatggcttgaactcttaggggtctgcagtgctccatctccattggtggccccagctcagtaactatacctggtacatttcctgtgtgcaatcagtaccttgaaggcagaacattctgaataaagttggaaaaagaacagctttgctttgcaaagattgatgacagactggttcctcagaggcctaggctacccgtcacccctttttccagagcgagggcctggaatgaaggcagtttatcctctgtccctggagcctggggtttgctttggctccttgaggtggaagagactaagagggcagctgcccagagcagctgtgtgtacctggctcctctcaggcttcctgatcccttccgttgcactgcgccttatccctcagccagccagacagcctccctgctcctgaccagcagatacgtttcggagtggttggtgtggtttttgtgatgagggcagcacgtggtggccaaggtggcaagctgagtctcacaggctcactccctcgttggttccctgtgggaatggtaggccaggcccagtaagccatgccccaacacgtcctctcctccggaggaagggccagctgccagctgagtcagcagctagtccatagcacagccttataactgtaaagccaggcattgcccatgagcagagctggaaccagagcttcagtcagtaagagggaggattaccttcaggagaaggcaaggaagaaaactggctgctatctttatagttccactgccctaaccaagtgtccacattctaaatgtgtagtgtccatcccttatgtaatagtggtttcccgcccaaagtgagactttccttttaattggagaagggtatagaggtagtccaggtgggaacgccagaagtgctgattgcccagccattgggaccacctgttcttgccccactaccctctagtgggaggccaaagtaaaggctggctggtgggtgtctgtggattgaggatgtggcagggactggtcctcccacctccctctggccaaagatgggctttgcccgctgtgtgcctgtcaccacccaccagcagtcatgccctgggcttcccaaatggagaggtagcaggcaacgtttttaaaaagaaagaaaacaggaaactgtattgtgtcgggggaggcgggagggagatgaggaaacggtttggattttgtgtgtgggagggtattttttgggggtagttgtctgtaactttcctaagtgctttttttccttttcttttttaaagtaagttgcaggctttggcttggaaaaccccagggggatggggggcagaaacctgaggctgctgcccctttatctgccttcacggtactgtccccttcccccagctcctccctgaccccatgggccaggcctcagaccttccagctaaccgcttcccatgagccactactctgatgtcagcctataaccaaaggagctggggggtccaggcctggtgaccaacctttctcagcccactcaatcagggtgctccccacctgcaggcaggaggcaacaccctatctgctaccatcagccccttccagagcccatctgccccgcccagccctgccctgcccagccataccctgctctgccccatctgggggtgccctgctcagggatgggctggcagggctgtacccagcctccctggtaagcagagactcaagaaacctctggggtcctgttttctggtcgtgtgatcccaggggtgcacatgggccccttgggtgtctgaacagaagggcatgggagggagggctgcacccctgcagtcttactctgctggtgtagcgggcagctgcccactcccaccccaccctgcaccgcgggctcctgagtcggcagattaagcattttataaattgtattttaaatacatgttttaaacttg

SEQ ID NO: 31 - DNA, 5470 bp, Homo sapiens
gattgccccctgtgggtcactttctcagtcattttgagctcagcctaatcaaagactgaggttatgaagtcgatcctagatggccttgcagataccaccttccgcaccatcaccactgacctcctgtacgtgggctcaaatgacattcagtacgaagacatcaaaggtgacatggcatccaaattagggtacttcccacagaaattccctttaacttcctttaggggaagtcccttccaagagaagatgactgcgggagacaacccccagctagtcccagcagaccaggtgaacattacagaattttacaacaagtctctctcgtccttcaaggagaatgaggagaacatccagtgtggggagaacttcatggacatagagtgtttcatggtcctgaaccccagccagcagctggccattgcagtcctgtccctcacgctgggcaccttcacggtcctggagaacctcctggtgctgtgcgtcatcctccactcccgcagcctccgctgcaggccttcctaccacttcatcggcagcctggcggtggcagacctcctggggagtgtcatttttgtctacagcttcattgacttccacgtgttccaccgcaaagatagccgcaacgtgtttctgttcaaactgggtggggtcacggcctccttcactgcctccgtgggcagcctgttcctcacagccatcgacaggtacatatccattcacaggcccctggcctataagaggattgtcaccaggcccaaggccgtggtggcgttttgcctgatgtggaccatagccattgtgatcgccgtgctgcctctcctgggctggaactgcgagaaactgcaatctgtttgctcagacattttcccacacattgatgaaacctacctgatgttctggatcggggtcaccagcgtactgcttctgttcatcgtgtatgcgtacatgtatattctctggaaggctcacagccacgccgtccgcatgattcagcgtggcacccagaagagcatcatcatccacacgtctgaggatgggaaggtacaggtgacccggccagaccaagcccgcatggacattaggttagccaagaccctggtcctgatcctggtggtgttgatcatctgctggggccctctgcttgcaatcatggtgtatgatgtctttgggaagatgaacaagctcattaagacggtgtttgcattctgcagtatgctctgcctgctgaactccaccgtgaaccccatcatctatgctctgaggagtaaggacctgcgacacgctttccggagcatgtttccctcttgtgaaggcactgcgcagcctctggataacagcatgggggactcggactgcctgcacaaacacgcaaacaatgcagccagtgttcacagggccgcagaaagctgcatcaagagcacggtcaagattgccaaggtaaccatgtctgtgtccacagacacgtctgccgaggctctgtgagcctgatgcctccctggcagcacaggaaaagaatttttttttttaagctcaaaatctagaagagtctattgtctccttggttatatttttttaactttaccatgctcaatgaaaaggtgattgtcaccatgatcacttatcagtttgctaatgtttccatagtttaggtactcaaactccattctccaggggtttacagtgaagaaagcctgttgtttaagtgactgaacgatccttcaaagtctcaatgaaataggagggaaacctttggctacacaattggaagtctaagaacccatggaaaaatgccatcaaatgaataatgcctttgtaaccacaactttcactataatgtgaaatgtaactgtccgtagtatcagagatgtccatttttacaagttatagtactagagatattttgtaaaatgtattatgtcctgtgagatgtgtatcagtgtttatgtgctattaatatttgtttagttcagcaaaactgaaaggtagacttttatgagaacaatggacaagcagtggatacgtgtcaatgtgtgcactttttttctatattattgcccatgatataactttagaaataaaccttaatatttcttcaaatatctctatttaattttgacactgaaataaccgtaaaggtttatttttctgttacctcaacaagaagaatttgaagacttcaaaatattgagcagaattcattcatacttaaaaatttattagccctgcattttcataggaagacacattatcttctggactatagctgttctaatggattataatcagaatggaagagagaaagcatattgactttttttgagcgacatctctgactttctttagtctttagctattactggatctcttaagacagcatgtgttaatcttaatgtatatcgttatcactgtgcagttgctgtttacttgaatagtattgtgttcctatattccaggtttaagtagatttcatgcctgggtggccaaacaacagtcttcattttttttaattgaaaagaagtagtgtctggatcagtaaaattatactgtgtgtgagtgtgaatataaatgtgtgtatgtgtgtttctgtcctgtaactgttacagtaatgtcataaagtgagaaaactgtgaccaagtataaacttttaccacttgctgcactcttgcacatggattcagtttctaaaattgagttcttcctgtaatcttgttgataaaaatactgactccaaccattcaaaaatttcaccccatccctccttaagagattggatcaagtattactaaattgacctttaggtattacacaagaccagtgcttagcaaaaaataatgacaggcatccaaggaagggatgtatttgtagtgttattgccaggaaaggagagtactttggtttctgagcaccgaatattgagcaatatgtcagtcactaaaaggaagacagttctacagaaaaacaatggtaacatttttcaatagcgtgtgtagatagtatgcactatatacatcacgttaaagtaggactatcacacccagcccatgtggctaaaaaagctgaatcagacagtggatgagacacacaacggcagtgaagaaccgatacacttggcattgacgtctagctatgctgtatctgtgctttgcccacatgcccttggtgacagctgagcacccagctctgtcttggtaggtttgggctaaggaacaaatctctcctttgctcgtggttagcaagatacactcaagcatgaagataaacacagctgctttcttcttacaccccggtctcatgctccttaatggcgccatgggtgcttgttgggcctttttccagtaaggaatgatattgctgaagaatctacttaaccctgacaaattttaattataatctcttcttatacagataaaacatgactcctacaaggccccaaggtttacatagtctgaagtgaagtacagagctggcatctatctggtgatttctagctctcgagatacccaagcagcctgatggggcagttccccttcttacggttcacgctctaaggcaggatgtggcttatgagatactttgcattgtctgtctgcacaccttgaatctgcctgctggctcccttactttacctctctgtcatgtgcagatgaaggctcagggtgctagaggattagtaagatctctttctaaagacaggagagattatttacaagaagaactcaccagggtttagtttgcatttaagaattgccagtcttttgtcctgcatcatcttgaacattaatccacatgtttcagagctcaccaggcagtaccaatgctcttttcacagctatgaagagctagagaaattcttgttatggtagaaaaatttcacgattcatttttgaaactgcatttgtgcgtatgcagtgtagattttatagtgtgttgtgctttcaagatctaaatcatatataataaattaagggacaatggggctgacagcactaaacttggtgcttattgatattctaagaaatatctgtgaaatatcatcacgtatgttatacaaccttcatttaaaaaggtttaaaactagttagattcactttgacacttttcatatcatttcttaacccaagtgacgaaaacattgtccccaatgaatatactcattagaattaccatttgttaatatcactcattaattaaccccataattagatccattaatttaaatgatttaaatttaagtaagttttataaggtctgacatcagaggtatcttactttcctctgaggatgatgtacttgccctgaccatgcattttaccatcacacatgttcagaaagggccaaattcccaacctgctcattttttttttatcagagtcatgatgaatcagtcctagaatgtttcatttgcacaagtagggctgcctccaagaggaacctctgatttattttgtatgaaatatatgtgaaaggatatgaatctgagagatgctgtagacatctgtcctacacttgagatgatttccaagcctctctggcactttgagttaagtctatctggtattaaatgccaaggaccttttgctgcctaaatccactctgcaggaaataggcccaaccaccagatgagaattaggccctggatgagtagcgctatagttactgtcctgttgattaatttctgccatttcatgtccataaaagagaccacccatatcatgcacacaattagatttctcacactctaactgtatatttgtatgatattttaaaatctcctaaatgctgggcaatggctattaacaattaattgtcttgcactggccttctgatgaaatgttaacaatgcctattgtaatatagaaaaaaacattctatctactgatttgggctgaatgtatgtaaataggtttctaaaaagtcagatgtttgagcagtggcctacaaatcagtaattttcggatgggagagtttctttacattgccgtggcatcttaaaagctatcttcatgtaaattgactgtactaggcctactggggatcagagttcccaagaaaggaaaccttttcttgtatctggattcaaatttatttccaatgtttcaagcgggaaacatgactctttattgtctgtaaatctaacattattacttttcctcttagaagaatattgtattgttagatgtttgttgagctggtaacatcgttgcaaccactgcaatatcttcgttagtaatctgtataatactttgtatacaagtactggtaagattgttattaaatgtagcttcagtcattaaattactatagcaaagtagtacttcttctgtaatatttacaatgtattaagcccacagtatattttatttcaatgtaattaaactgttaacttattcaaagagaaaacatctcatcatgtctattgtccaaagttacctggaatcaaataaaaattctagattaccatgaagaacat

SEQ ID NO: 32 - DNA, 1517 bp, Homo sapiens
gcggcgcggagggcgcgggcccgggagccagggagcgagcggggcgcccggcagcgcggagtcagcgccgcgggggccgcacccgactcgcgcctggacactcgcggggcgccgacctggcagggggccaaaccagtgctcctgccacctctctggctgccccctagagcctgcccatcccagcctgaccaatgtccacagccagggagcagccaatcttcagcacacgggcgcacgtgttccaaattgacccagccaccaagcgaaactggatcccagcgggcaagcacgcactcactgtctcctatttctacgatgccacccgcaatgtgtaccgcatcatcagcatcggaggcgccaaggccatcatcaacagcactgtcactcccaacatgaccttcaccaaaacttcccagaagttcgggcagtgggccgacagtcgcgccaacacagtctacggcttgggctttgcctctgaacagcatctgacacagtttgccgagaagttccaggaagtgaaggaagcagccaggctggccagggagaaatctcaggatggcggggagctcaccagtccagccctggggctcgcctcccaccaggtgcccccgagccctctcgtcagtgccaacggccccggcgaggaaaaactgttccgcagccagagcgctgatgcccccggccccacagagcgcgagcggctaaagaagatgttgtctgagggctccgtgggcgaggtacagtgggaggccgagtttttcgcactgcaggacagcaacaacaagctggcaggcgccctgcgagaggccaacgccgccgcagcccagtggaggcagcagctggaggctcagcgtgcagaggccgagcggctgcggcagcgggtggctgagctggaggctcaggcagcttcagaggtgacccccaccggtgagaaggaggggctgggccagggccagtcgctggaacagctggaagctctggtgcaaaccaaggaccaggagattcagaccctgaagagtcagactggggggccccgcgaggccctggaggctgccgagcgtgaggagactcagcagaaggtgcaggacctggagacccgcaatgcggagttggagcaccagctgcgggcgatggagcgcagcctggaggaggcacgggcagagcgggagcgggcgcgggctgaggtgggccgggcagcgcagctgctggacgtcaggctgtttgagctgagtgagctgcgtgagggcctggcccgcctggctgaggctgcgccctgagccggggctggttttctatgaacgattccggcctgggatgcgggccaggctgcaggcggcatagttgggcccattcgtcctggaaagggactggggggtcccaacttagccctgggtgggccgggccgggctgggctggggtgggccccagtcggctctggttgttggcagctttggggctgtttttgagcttctcattgtgtagaatttctagatcccccgattacatttctaagcgtg

SEQ ID NO: 33 - DNA, 1228 bp, Homo sapiens
agagatggggacggaggccacagagcaggtttcctggggccattactctggggatgaagaggacgcatactcggctgagccactgccggagctttgctacaaggccgatgtccaggccttcagccgggccttccaacccagtgtctccctgaccgtggctgcgctgggtctggccggcaatggcctggtcctggccacccacctggcagcccgacgcgcagcgcgctcgcccacctctgcccacctgctccagctggccctggccgacctcttgctggccctgactctgcccttcgcggcagcaggggctcttcagggctggagtctgggaagtgccacctgccgcaccatctctggcctctactcggcctccttccacgccggcttcctcttcctggcctgtatcagcgccgaccgctacgtggccatcgcgcgagcgctcccagccgggccgcggccctccactcccggccgcgcacacttggtctccgtcatcgtgtggctgctgtcactgctcctggcgctgcctgcgctgctcttcagccaggatgggcagcgggaaggccaacgacgctgtcgcctcatcttccccgagggcctcacgcagacggtgaagggggcgagcgccgtggcgcaggtggccctgggcttcgcgctgccgctgggcgtcatggtagcctgctacgcgcttctgggccgcacgctgctggccgccagggggcccgagcgccggcgtgcgctgcgcgtcgtggtggctctggtggcggccttcgtggtgctgcagctgccctacagcctcgccctgctgctggatactgccgatctactggctgcgcgcgagcggagctgccctgccagcaaacgcaaggatgtcgcactgctggtgaccagcggcttggccctcgcccgctgtggcctcaatcccgttctctacgccttcctgggcctgcgcttccgccaggacctgcggaggctgctacggggtgggagctcgccctcagggcctcaaccccgccgcggctgcccccgccggccccgcctttcttcctgctcagctcccacggagacccacagtctctcctgggacaactagggctgcgaatctagaggagggggcaggctgagggtcgtgggaaaggggagtaggtgggggaacactgagaaagaggcagggacctaaagggactacctctgtgccttgccacattaaattgataacatggaaatg

SEQ ID NO: 34 - DNA, 2057 bp, Homo sapiens
aaaaaaaaaaacacaggcttgatgctcgctcccgtttctacaggaggttttgacggctggatgctgcagggcatcccctcgcctggaggaggttcacttgtggccaggttcccagcacacccacttgctcactggggccctggggacaccgccacactcgagcccatcctacggcctcaatccttaccagtccccaggccatggactgccacactgtaggtcttcaatcaaggtttagtggagtttcgaatgtacacacaccctgaaagacagcgaggccacctcagaaaacaacgcgcgcccagctggctcccctccgacagggcccacggctactgggtcggcctcctccggaccctgagcacagcctggtatgcgtgcgggctcggaatacggatctgagcagaagaaatgcgagtggagagcggttctgcgcaggaaagaggaattttgttggaaagcctgtcgacgttgctagaaaagaccacagcatctcacgaggggcgtgcgccgggaaaccgggagttgacggacctcctgccccccgaggtctgcagtctcctgaacccagcagccatctacgccaacaacgagatcagcctgcgtgacgttgaggtctacggctttgactacgactacaccctggcccagtatgcagacgcactgcaccccgagatcttcagtaccgcccgtgacatcctgatcgagcactacaagtacccagaagggattcggaagtatgactacaaccccagctttgccatccgtggcctccactatgacattcagaagagccttctgatgaagattgacgccttccactacgtgcagctggggacagcctacaggggcctccagcctgtgccagacgaggaggtgattgagctgtatgggggtacccagcacatcccactataccagatgagtggcttctatggcaagggtccctccattaagcagttcatggacatcttctcgctaccggagatggctctgctgtcctgtgtggtggactactttctgggccacagcctggagtttgaccaagcacatctctacaaggacgtgacggacgccatccgagacgtgcatgtgaagggcctcatgtaccagtggatcgagcaggacatggagaagtacatcctgagaggggatgagacgtttgctgtcctgagccgcctggtggcccatgggaaacagctgttcctcatcaccaacagtcctttcagcttcgtagacaaggggatgcggcacatggtgggtcccgattggcgccagctcttcgatgtggtcattgtccaggcagacaagcccagcttcttcactgaccggcgcaagcctttcagaaaactcgatgagaagggctcacttcagtgggaccggatcacccgcttggaaaagggcaagatctatcggcagggaaacctgtttgacttcttacgcttgacggaatggcgtggcccccgcgtgctctacttcggggaccacctctatagtgatctggcggatctcatgctgcggcacggctggcgcacaggcgccatcatccccgagctggagcgtgagatccgcatcatcaacacggagcagtacatgcactcgctgacgtggcagcaggcgctcacggggctgctggagcgcatgcagacctatcaggacgcggagtcgaggcaggtgctggctgcctggatgaaagagcggcaggagctgaggtgcatcaccaaggccctgttcaatgcgcagttcggcagcatcttccgcaccttccacaaccccacctacttctcaaggcgcctcgtgcgcttctctgacctctacatggcctccctcagctgcctgctcaactaccgcgtggacttcaccttctacccacgccgtacgccgctgcagcacgaggcacccctctggatggaccagctctgcaccggctgcatgaagacccccttccttggtgacatggcccacatccgctgagggcacctttattgtctgggacaggccctcagcccctcctgccccatccacccagacaagcaataaaagtggtctcctccctg

SEQ ID NO: 35 - DNA, 2413 bp, Homo sapiens
attcatttcccccagtgaccttgacaagtcagaagcttgaaagcagggaaatccggatgtctcggttatgaagtggagcagtgagtgtgagcctcaacatagttccagaactctccatccggactagttattgagcatctgcctctcatatcaccagtggccatctgaggtgtttccctggctctgaaggggtaggcacgatggccaggtgcttcagcctggtgttgcttctcacttccatctggaccacgaggctcctggtccaaggctctttgcgtgcagaagagctttccatccaggtgtcatgcagaattatggggatcacccttgtgagcaaaaaggcgaaccagcagctgaatttcacagaagctaaggaggcctgtaggctgctgggactaagtttggccggcaaggaccaagttgaaacagccttgaaagctagctttgaaacttgcagctatggctgggttggagatggattcgtggtcatctctaggattagcccaaaccccaagtgtgggaaaaatggggtgggtgtcctgatttggaaggttccagtgagccgacagtttgcagcctattgttacaactcatctgatacttggactaactcgtgcattccagaaattatcaccaccaaagatcccatattcaacactcaaactgcaacacaaacaacagaatttattgtcagtgacagtacctactcggtggcatccccttactctacaatacctgcccctactactactcctcctgctccagcttccacttctattccacggagaaaaaaattgatttgtgtcacagaagtttttatggaaactagcaccatgtctacagaaactgaaccatttgttgaaaataaagcagcattcaagaatgaagctgctgggtttggaggtgtccccacggctctgctagtgcttgctctcctcttctttggtgctgcagctggtcttggattttgctatgtcaaaaggtatgtgaaggccttcccttttacaaacaagaatcagcagaaggaaatgatcgaaaccaaagtagtaaaggaggagaaggccaatgatagcaaccctaatgaggaatcaaagaaaactgataaaaacccagaagagtccaagagtccaagcaaaactaccgtgcgatgcctggaagctgaagtttagatgagacagaaatgaggagacacacctgaggctggtttctttcatgctccttaccctgccccagctggggaaatcaaaagggccaaagaaccaaagaagaaagtccacccttggttcctaactggaatcagctcaggactgccattggactatggagtgcaccaaagagaatgcccttctccttattgtaaccctgtctggatcctatcctcctacctccaaagcttcccacggcctttctagcctggctatgtcctaataatatcccactgggagaaaggagttttgcaaagtgcaaggacctaaaacatctcatcagtatccagtggtaaaaaggcctcctggctgtctgaggctaggtgggttgaaagccaaggagtcactgagaccaaggctttctctactgattccgcagctcagaccctttcttcagctctgaaagagaaacacgtatcccacctgacatgtccttctgagcccggtaagagcaaaagaatggcagaaaagtttagcccctgaaagccatggagattctcataacttgagacctaatctctgtaaagctaaaataaagaaatagaacaaggctgaggatacgacagtacactgtcagcagggactgtaaacacagacagggtcaaagtgttttctctgaacacattgagttggaatcactgtttagaacacacacacttactttttctggtctctaccactgctgatattttctctaggaaatatacttttacaagtaacaaaaataaaaactcttataaatttctatttttatctgagttacagaaatgattactaaggaagattactcagtaatttgtttaaaaagtaataaaattcaacaaacatttgctgaatagctactatatgtcaagtgctgtgcaaggtattacactctgtaattgaatattattcctcaaaaaattgcacatagtagaacgctatctgggaagctatttttttcagttttgatatttctagcttatctacttccaaactaatttttatttttgctgagactaatcttattcattttctctaatatggcaaccattataaccttaatttattattaacatacctaagaagtacattgttacctctatataccaaagcacattttaaaagtgccattaacaaatgtatcactagccctcctttttccaacaagaagggactgagagatgcagaaatatttgtgacaaaaaattaaagcatttagaaaactt

SEQ ID NO: 36 - DNA, 4977 bp, Homo sapiens
gggaggggcgggatttcctgcgggaggcgccgagccggccttggaaaaggagaaggagaaaggggggcaggggggagtgggagccaccgtcctgagtgccagggaccgagcagggccagccggaccccggcgggcggccgggagagagccctgagaccagtgcaccgctgctgcctgaggcccaagggaatgctggctgctctctgggtgggcactggtgttccacagccaagccgggaagattggtgtgcccagtcccagcccatcctggagctgtcggaagccacaagctgatatccatccagatttccatgtagccttcaccccctcaaagattagctttccttcgtgtggtggcagttcacggagcacctttgggagtatccctcagtacctgacgaggagcccactgcctgggacaccagacttgctcccccggaaccgggagccctccaaggggctgtggcatggcgccctgacgccccagcttggacccgttgcctgcctttgccctggactcctgagtgtagagctcagcccaggagccagtatgggtcgtgaacaggacctgatcctcgccgtcaagaatggagatgtgaccggtgtgcagaaactggtggcgaaggtcaaggccacaaagacaaagctcctgggctccacaaagaggctcaacgtgaactaccaggatgctgatggattctctgccctccaccacgctgctttggggggcagcctggagctcatagccttgctgctagaggctcaggccactgttgacatcaaggacagcaatggcatgcgcccgctgcactacgcagcctggcagggccggctggagcctgtgaggctgctgctgcgcgcctctgcggctgtcaatgccgcctcgctggacggacagatccccctgcacctggctgcacagtatggacattatgaggtgtcagaaatgctcctccagcatcagtccaacccatgcctggtcaacaaggccaagaagacgcccctggacctggcctgtgaatttggccgactcaaggtggcccagctgcttctgaacagccacttatgtgtggcactgctggagggtgaggccaaagacccgtgtgaccccaactacaccacgcccctgcacttggctgccaagaatggccacagagaagtcatcaggcagctcctgagagctgggatcgagatcaaccgccagaccaagacgggtacggcgctccacgaggccgcactgtatggcaagaccgaggtggtgcggctgcttctggagggaggtgtggacgtgaacatccggaatacgtataaccagacggcgctggacatagtgaatcagttcaccacctcccaggccagccgggaaatcaagcagctactgcgggaggcctcagggatcctgaaggtccgagcgctcaaggatttctggaacctccacgatcccactgctctcaatgtccgggcaggggatgtcatcacggtgctagaacagcatcccgacggccgctggaagggccacatccacgagagccagaggggcacagaccgcataggctacttccccccgggcattgtcgaggtggtcagcaagcgggtgggcatccctgcagcccgcctcccctccgcacccacccccctgcgcccaggcttctcccggacaccgcagcctcctgccgaagaacccccgcaccctcttacctacagccagcttcctcgggtgggcctcagcccagacagcccagcaggtgacaggaatagtgtgggcagtgagggcagcgtgggcagcatccgcagtgccggcagcgggcagagctctgagggcactaatggccatggccctggcctcctgattgagaacgcccagccactgccctctgctggagaggaccaggtgctgccaggactccacccgccgtccctggcagacaacctgagccaccgccctctggccaactgccgctctggggagcagatcttcacccaggacgtgcggccagaacagctgctggaggggaaggacgcgcaggccattcataactggctaagcgagttccagctggagggctacactgcccactttctgcaggccggctatgatgtgcctaccatcagccgcatgacacctgaggacctgacggccatcggggtgaccaagcctgggcacaggaagaagatcgcctcagagatcgctcagctcagcatcgccgagtggctgcccagctacatcccaacggacctgctggagtggctgtgtgcactggggctgccacagtaccacaagcagctggtgagcagcggctacgactccatggggctggtggccgacctcacctgggaggagctgcaggagattggggtcaacaagctcgggcatcagaagaagctcatgctgggggtgaagcggctggcggagcttcggcggggcctgctgcagggggaggccctcagcgaaggcgggcgccggctggccaagggtccggagctgatggccatcgagggactggagaacggagaaggcccagctacagctggcccacggctcctcaccttccagggcagcgaactaagcccagagctacaggcggccatggcagggggtggccctgaaccactccccctcccacctgcccgctctcccagccaggagagcatcggggcacgctcacgggggtctggccactcacaggaacagcctgccccacagcccagcggtggagatcccagccccccccaggagaggaacctcccagagggcacagagcggccccctaagctttgttcttcacttcctggccaaggacccccaccctatgtttttatgtacccccagggctcaccctctagcccggccccagggccacctcctggcgcaccctgggccttctcctacttggccgggccccctgccactcccccagacccgcctcgacctaagcgccggtcccacagcctaagccgccctggccccacagagggggatgctgagggggaggccgaagggccagtgggcagcaccctaggcagttatgctacccttacccggcggccaggacgcagtgcccttgtccggaccagtcctagcgtgaccccaaccccagctcgggggactcctcgcagccagtcctttgccctgcgggcccggcgcaaaggccccccgcccccgccccccaagcgcctcagctccgtctctggccccagcccggagccacctccactagatgggagcccagggcccaaggaaggggccacagggccccgaaggcgaacactgagtgaacctgctggcccctcagagccccctggcccacctgccccggctgggcccgcgtcagacacggaggaggaggagccaggccctgaggggacgcccccatctcggggcagctctggggaagggctgccgtttgcagaggaagggaacctgaccatcaaacagcgcccgaagcccgctggccccccgccccgagagacacccgtgccccccggcctcgatttcaacctcacggaatcagacactgttaagcggaggcccaagtgccgggagagagagccactgcagaccgcactgctggccttcggagtggccagtgccacgcctggccccgctgccccactgccttccccaactcctggcgagtctcctccagcttctagccttccccagcccgagcccagcagccttccagcccaaggagttccaaccccccttgctcccagccccgccatgcagcctccagtgccgccctgcccagggccaggtctggaaagctcagcagctagtcggtggaatggggagacagaacccccggccgcccctgctgccctcctcaaggtgcccggagcaggaacagcccccaagcctgtgtcggtggcctgcacccagctggcattttctggccctaagctagcgccccggctcggcccccgcccagtgcctcctccacggcctgagagcactgggactgtgggcccaggccaggcccagcagagactggagcagaccagctcgtccctggcagctgcactgagagccgcagagaagagcattggcaccaaggagcaagagggcacccccagcgcctccaccaagcacattctggatgacatcagcaccatgttcgacgccctggctgaccagctggacgccatgctggactgagccctccagcagtgcccactgtgacctgccgaagtccactgcctttgccccagcacagaagaggcccctgccaccctagggacgggccaagggctggtcaggctgaagtgcccctcctagcagggccccttcccactcagcccgcggctgtgggcaccacagctcttgtggggcagcccaccttagaacctgactagcgagggacctccgctgcatctcagcaaagcccctcccagggtttgatcgattgagcaggacagccctgctcctggacagggaccctggtaagagctctctcctcagggaggaagtaggggtggggctttgggggtgctttctctgtaccccccagcccatgtcccaagttgtgccaagggaatgcctcttgccacccaccatcctgcccaggccctgagaggctggaggaggcgtgtgtctggccgggccccctctccgtaggtgtacagaggacatgtaaatacacagcggtggtgcccaggcagctcctgcccccgccttccctcactgaggcagggctagcaggggtgggaggcagtggggttaacagatcccacaagtcctaacttttcaattgtaaatgttattttctaagcagagagaaatgcatatattttaaatggaatttattctatcaactgcctgagaggacacaatgggggaggggcttcggaccacagcaggagccccgactgcccacctgagggcagggagagcctgaccccattggcccaggccctggctctgtaaccattaacctcttcccccaactaacaccaatgaaaacaccattccacgtg

SEQ ID NO: 37 - DNA, 6202 bp, Homo sapiens
cgcagactgtgctggagctggtgctgaaaaagggggtttgcagaggctgccctggggctggtgctgaaagaagagcccacagctgacttcatggtgctacaataacctcagaatctacttttcactctcaggagaacccacagtctaatatttagacatgatggcaaactgggcggaagcaagacctctcctcattcttattgttttattagggcaatttgtctcaataaaagcccaggaagaagacgaggatgaaggatatggtgaagaaatagcctgcactcagaatggccagatgtacttaaacagggacatttggaaacctgccccttgtcagatctgtgtctgtgacaatggagccattctctgtgacaagatagaatgccaggatgtgctggactgtgccgaccctgtaacgccccctggggaatgctgtcctgtctgttcacaaacacctggaggtggcaatacaaattttggtagaggaagaaagggacaaaagggagaaccaggattagtgcctgttgtaacaggcatacgtggtcgtccaggaccggcaggacctccaggatcacagggaccaagaggagagcgagggccaaaaggaagacctggccctcgtggacctcagggaattgatggagaaccaggtgttcctggtcaacctggtgctccaggacctcctggacatccgtcccacccaggacccgatggcttgagcaggccgttttcagctcaaatggctgggttggatgaaaaatctggacttgggagtcaagtaggactaatgcctggctctgtgggtcctgttggcccaaggggaccacagggtttacaaggacagcaaggtggtgcaggacctacaggacctcctggtgaacctggtgatcctggaccaatgggtccgattggttcacgtggaccagagggccctcctggtaaacctggggaagatggtgaacctggcagaaatggaaatcctggtgaagtgggatttgcaggatctccgggagctcgtggatttcctggggctcctggtcttccaggtctgaagggtcaccgaggacacaaaggtcttgaaggccctaaaggtgaagttggagcacctggttccaagggtgaagctggccccactggtccaatgggtgccatgggtcctctgggtccgaggggaatgccaggagagagagggagacttgggccacagggtgctcctggacaacgaggtgcacatggtatgcctggaaaacctggaccaatgggtcctcttgggataccaggctcttctggttttccaggaaatcctggaatgaagggagaagcaggtcctacaggggcgcgaggccctgaaggtcctcaggggcagagaggtgaaactgggcccccaggtccagttggctctccaggtcttcctggtgcaataggaactgatggtactcctggtcccaaaggcccaacgggctctccgggtacctctggtcctcctggctcagcagggcctcctggatctccaggacctcagggtagcactggtcctcaggggaattcgggccttccgggtgatccaggtttcaaaggagaagctggcccaaaaggggaaccagggccacatggtattcagggtccgataggcccacccggtgaagaaggcaaaagaggtcccagaggtgacccaggaacacttggtcctccagggccagtgggagaaaggggtgctcctggcaatcgtggttttccaggctctgatggtttacctgggccaaagggtgctcaaggagaacggggtcctgtaggttcttcaggacccaaaggaagccagggggatccaggacgtccaggggaacctgggcttccaggtgctcggggtttgacaggaaatcctggtgttcaaggtcctgaaggaaaacttggacctttgggtgcgccaggggaagatggccgtccaggtcctccaggctccataggaatcaaagggcagcccgggaccatgggccttccaggccccaaaggtagcaatggtgaccctgggaaacctggagaagcaggaaatcctggagttcctgggcaaaggggagctcctggaaaagatggtaaagttggtccttatggtcctcctgggccgccgggtctacgtggtgaaagaggagaacaaggacctccagggcccacaggttttcaggggcatcctggtcctccaggtcctcctggagaaggtggaaaaccaggtgatcaaggtgttcctggaggtcccggagcagttggcccgttaggacctagaggagaacgaggaaatcctggggaaagaggagaacctgggataactggactccctggtgagaagggaatggctggaggacatggtcctgatggcccaaaaggcagtccaggtccatctgggacccctggagatacaggcccaccaggtcttcaaggtatgccgggagaaagaggaattgcaggaactcctggccccaagggtgacagaggtggcataggagaaaaaggtgctgaaggcacagctggaaatgatggtgcaggaggtcttccaggtcctttgggccctccaggtccggcaggcctactgggagaaaagggtgaacctggtcctcgaggtttagttggtcctcctggctcccggggcaatcctggttctcgaggtgaaaatgggccaactggagctgttggttttgccggaccccaggggtctgacggacagcctggagtaaaaggtgaacctggagagccaggacagaagggagatgctggttctcctggaccacaaggtttagcaggatcccctggccctcatggtcctaatggtgttcctggactaaaaggtggtcgaggaacccaaggtccgcctggtgctacaggatttcctggttctgcgggcagagttggacctccaggccctgctggagctccaggacctgcgggacccctaggggaacccgggaaggagggacctccaggtcctcgtggggaccctggctctcatgggcgtgtgggagtccgaggaccagctggcccccctggtggcccaggagacaaaggggacccaggagaagatgggcaacctggtccagatggcccccctggtccagctggaacgaccgggcagagaggaattgttggcatgcctgggcaacgtggagagagaggcatgcccggcctaccaggcccagcgggaacaccaggaaaagtaggaccaactggtgcaacaggagataaaggtccacctggacctgtggggcccccaggctccaatggtcctgtaggggaacctggaccagaaggtccagctggcaatgatggtaccccaggacgggatggtgctgttggagaacgtggtgatcgtggagaccctgggcctgcaggtctgccaggctctcagggtgcccctggaactcctggccctgtgggtgctccaggagatgcaggacaaagaggagatccgggttctcggggtcctataggacacctgggtcgagctggaaaacgtggattacctggaccccaaggacctcgtggtgacaaaggtgatcatggagaccgaggcgacagaggtcagaagggccacagaggctttactggtcttcagggtcttcctggccctcctggtccaaatggtgaacaaggaagtgctggaatccctggaccatttggcccaagaggtcctccaggcccagttggtccttcaggtaaagaaggaaaccctgggccacttgggccattgggacctccaggtgtacgaggcagtgtaggagaagcaggacctgagggccctcctggtgagcctggcccacctggccctccgggtccccctggccaccttacagctgctcttggggatatcatggggcactatgatgaaagcatgccagatccacttcctgagtttactgaagatcaggcggctcctgatgacaaaaacaaaacggacccaggggttcatgctaccctgaagtcactcagtagtcagattgaaaccatgcgcagccccgatggctcgaaaaagcacccagcccgcacgtgtgatgacctaaagctttgccattccgcaaagcagagtggtgaatactggattgatcctaaccaaggatctgttgaagatgccatcaaagtttactgcaacatggaaacaggagaaacatgtatttcagcaaacccatccagtgtaccacgtaaaacctggtgggccagtaaatctcctgacaataaacctgtttggtatggtcttgatatgaacagagggtctcagttcgcttatggagaccaccaatcacctaatacagccattactcagatgacttttttgcgccttttatcaaaagaagcctcccagaacatcacttacatctgtaaaaacagtgtaggatacatggacgatcaagctaagaacctcaaaaaagctgtggttctcaaaggggcaaatgacttagatatcaaagcagagggaaatattagattccggtatatcgttcttcaagacacttgctctaagcggaatggaaatgtgggcaagactgtctttgaatatagaacacagaatgtggcacgcttgcccatcatagatcttgctcctgtggatgttggcggcacagaccaggaattcggcgttgaaattgggccagtttgttttgtgtaaagtaagccaagacacatcgacaatgagcaccaccatcaatgaccaccgccattcacaagaactttgactgtttgaagttgatcctgagactcttgaagtaatggctgatcctgcatcagcattgtatatatggtcttaagtgcctggcctccttatccttcagaatatttattttacttacaatcctcaagttttaattgattttaaatatttttcaatacaacagtttaggtttaagatgaccaatgacaatgaccacctttgcagaaagtaaactgattgaataaataaatctccgttttcttcaatttatttcagtgtaatgaaaaagttgcttagtatttatgaggaaattcttcttcctggcaggtagcttaaagagtggggtatatagagccacaacacatgtttattttgcttggctgcagttgaaaaatagaaattagtgcccttttgtgacctctcattccaagattgtcaattaaaaatgagtttaaaatgtttaacttgtgatcgagacctacatgcatgtcttgatattgtgtaactataatagagactctttaaggagaatcttaaaaaaaaaaaacgtttctcactgtcttaaatagaatttttaaatagtatatattcagtggcattttggagaacaaagtgaatttacttcgacttcttaaatttttgtaaaagactataagtttagacatctttctcattcaaatttaaagatatctttctcctcttgatcaatctatcaatattgatagaagtcacactagtatataccatttaatacatttacactttcttatttaagaagatattgaatgcaaaataattgacatatagaactttacaaacatatgtccaaggactctaaattgagactcttccacatgtacaatctcatcatcctgaagcctataatgaagaaaaagatctagaaactgagttgtggagctgactctaatcaaatgtgatgattggaattagaccatttggcctttgaactttcataggaaaaatgacccaacatttcttagcatgagctacctcatctctagaagctgggatggacttactattcttgtttatattttagatactgaaaggtgctatgcttctgttattattccaagactggagataggcagggctaaaaaggtattattatttttcctttaatgatggtgctaaaattcttcctataaaattccttaaaaataaagatggtttaatcactaccattgtgaaaacataactgttagacttcccgtttctgaaagaaagagcatcgttccaatgcttgttcactgttcctctgtcatactgtatctggaatgctttgtaatacttgcatgcttcttagaccagaacatgtaggtccccttgtgtctcaatactttttttttcttaattgcatttgttggctctattttaatttttttcttttaaaataaacagctgggaccatcccaaaagacaagccatgcatacaactttggtcatgtatctctgcaaagcatcaaattaaatgcacgcttttgtcatgtc

SEQ ID NO: 38 - DNA, 3085 bp, Homo sapiens
gacggccgccggagccgcgaggccaactgtcgcctggttgggcccggaaatgggacgtcgcgctttctcagggagcgtagaagcagccagggcctctccaagccgctgctgtgacagaaagtgagtgagctgccggaggatgtccaccgccacgacagtcgcccccgcggggatcccggcgaccccgggccctgtgaacccaccccccccggaggtctccaaccccagcaagcccggccgcaagaccaaccagctgcagtacatgcagaatgtggtggtgaagacgctctggaaacaccagttcgcctggcccttctaccagcccgtggacgcaatcaaattgaacctgccggattatcataaaataattaaaaacccaatggatatggggactattaagaagagactagaaaataattattattggagtgcaagcgaatgtatgcaggacttcaacaccatgtttacaaattgttacatttataacaagcccacagatgacatagtgctaatggcccaagctttagagaaaatttttctacaaaaagtggcccagatgccccaagaggaagttgaattattaccccctgctccaaagggcaaaggtcggaagccggctgcgggagcccagagcgcaggtacacagcaagtggcggccgtgtcctctgtctccccagcgaccccctttcagagcgtgccccccaccgtctcccagacgcccgtcatcgctgccacccctgtaccaaccatcactgcaaacgtcacgtcggtcccagtccccccagctgccgccccacctcctcctgccacacccatcgtccccgtggtccctcctacgccgcctgtcgtcaagaaaaagggcgtgaagcggaaagcagacacaaccactcccacgacgtcggccatcactgccagccggagtgagtcgcccccgccgttgtcagaccccaagcaggccaaagtggtggcccggcgggagagtggtggccgccccatcaagcctcccaagaaggacctggaggacggcgaggtgccccagcacgcaggcaagaagggcaagctgtcggagcacctgcgctactgcgacagcatcctcagggagatgctatccaagaagcacgcggcctacgcctggcccttctacaagccagtggatgccgaggccctggagctgcacgactaccacgacatcatcaagcacccgatggacctcagcaccgtgaaaaggaagatggatggccgagagtacccagacgcacagggctttgctgctgatgtccggctgatgttctcgaattgctacaaatacaatcccccagaccacgaggttgtggccatggcccggaagctccaggacgtgtttgagatgaggtttgccaagatgccagatgagcccgtggaggcaccggcgctgcctgcccccgcggcccccatggtgagcaagggcgctgagagcagccgtagcagtgaggagagctcttcggactcaggcagctcggactcggaggaggagcgggccaccaggctggcggagctgcaggagcagctgaaggccgtgcacgagcagctggccgccctgtctcaggccccagtaaacaaaccaaagaagaagaaggagaagaaggagaaggagaagaagaagaaggacaaggagaaggagaaggagaagcacaaagtgaaggccgaggaagagaagaaggccaaggtggctccgcctgccaagcaggctcagcagaagaaggctcctgccaagaaggccaacagcacgaccacggccggcagacagctgaagaaaggcggcaagcaggcatctgcctcctacgactcagaggaagaggaggagggcctgcccatgagctacgatgaaaagcgccagcttagcctggacatcaaccggctgcccggggagaagctgggccgggtagtgcacatcatccaatctcgggagccctcgctcagggactccaaccccgacgagatagaaattgactttgagactctgaaacccaccactttgcgggaactggagagatatgtcaagtcttgtttacagaaaaagcaaaggaaaccgttctcagcaagcgggaagaaacaggcagccaagtcgaaagaggagctagctcaggaaaagaagaaggagctggaaaagcgtctgcaggatgtcagcgggcagctgagcagcagcaagaagcccgcccggaaagagaagcccggctcagcaccctcagggggcccgtccaggctcagcagcagcagctcctccgagtctgggagcagcagctccagcgggtccagctctgacagcagtgactcagaatgaactggcttcggacagaacaggacagatggatgtcgcacacgccgagactctgccgtacccctctgtggttcatattactacttctgttccatggtgtgcaggtctgcttcttaattcagtgttatgatatcttccagtttttgctttcataggtcagagatctatcttgtgtgtgcgttagacttgatgagaaggtgtgaactctgcagaaagtctcttcttcatcactgaattcagtcacttggagatgacaacttcaaatgctaacccgatgaccccagaaaaccgtgtgagattcgtaccgaagaaccttgtggaatccctttgcttaggcccaacctggtcgatagctcgagaaagaattttttccaaggaaatgtctcggatatgggtactgtatttgaaagctgttagctttgtcaacacgcattgtccttgtcatttgggccccgagctctgaccctcgtgtctgacgcggccacctctttctggaggggctgaggacagatgtgcctgcttgtggagaccaggctgggcctaagcgaagggtcatcgcagccccagcccggagcgtggagcccttggggggtggtcgggtgggatgtgcgttctccgctcgtggtgatgtcaggagctcctcggagggaacagagcggctgtgtatgcagcctgcaggtttccatacactgaagcttttacctcaactttaaaaaaaaaaaagaagaaaagattaaaaaaaaaaaaaaaaaactcgaggcatctatg

SEQ ID NO: 39 - DNA, 3120 bp, Homo sapiens
gagcaagccgagtggagggaggcaaaggccaggctgaggatcagggtggcccgggtggcagcggggaggcgctgcatgctggaggctgtgctgagtgcccggtgcaggtgagccggtcctgcggagttgtgccgagtgcctgctgcagtctcatttccagttcctccatgacgtggcaagtgaagacaggaatgaaaggaatgtaaagcagcttttctctgaagagaagaagagagagagacacagccaagaccgaggctgggccaagatggcgtctgtgtttcgaagcgaggagatgtgtttgtcacaactgtttctccaggtggaagctgcatattgctgtgtggctgagctcggagagctcggattggttcagttcaaagatttaaatatgaatgtgaacagctttcaaaggaaatttgtgaatgaagtcagaaggtgtgaatcactggagagaatcctccgttttctggaagacgagatgcaaaatgagattgtagttcagttgctcgagaaaagcccactgaccccgctcccacgggaaatgattaccctggagactgttctagaaaaactggaaggagagttacaggaagccaaccagaaccagcaggccttgaaacaaagcttcctagaactgacagaactgaaatacctcctgaagaaaacccaagacttctttgagacggaaaccaatttagctgatgatttctttactgaggacacttctggcctcctggagttgaaagcagtgcctgcatatatgaccggaaagttggggttcatagccggtgtgatcaacagggagaggatggcttcctttgagcggttactgtggcgaatctgccgaggaaacgtgtacttgaagttcagtgagatggacgcccctctggaggatcctgtgacgaaagaagaaattcagaagaacatattcatcatattttaccaaggagagcagctcaggcagaaaatcaagaagatctgtgatgggtttcgagccactgtctacccttgcccagagcctgcggtggagcgcagagagatgttggagagcgtcaatgtgaggctggaagatttaatcaccgtcataacacaaacagagtctcaccgccagcgcctgctgcaggaagccgctgccaactggcactcctggctcatcaaggtgcagaagatgaaagctgtctaccacatcctgaacatgtgcaacatcgacgtcacccagcagtgtgtcatcgccgagatctggttcccggtggcagatgccacacgtatcaagagggcactggagcaaggcatggaactaagtggctcctccatggcccccatcatgaccacagtgcaatctaaaacagcccctcccacatttaacaggaccaataaattcacagctggcttccagaatattgttgatgcctatggtgtcggcagctaccgggagataaacccagccccctacaccatcatcactttccccttcctgttcgctgtgatgtttggagactgtggtcatggaaccgtgatgctcctggctgcactttggatgattctgaatgagagacgcttgctctcccagaagacagacaatgagatttggaacaccttcttccacgggcgctatctgatcctacttatgggcatcttctccatctacacgggtttgatctacaatgactgcttctccaagtccttgaacatctttggctcttcttggagtgtccaacccatgttcagaaacggcacatggaatactcatgtaatggaggaaagtctatatctgcagctggacccagccataccaggagtgtattttggaaatccatacccgtttgggattgatccgatttggaacttggcttcaaacaaactcacatttctgaactcgtataaaatgaagatgtcggtgatcctgggaattgtccagatggtttttggtgtcatcctcagccttttcaatcacatatacttcagaagaactctcaacatcattctgcaatttatccctgagatgatttttatcctgtgtctgtttggatacctggttttcatgatcattttcaaatggtgctgctttgacgtccacgtatctcagcacgcccccagcatcctcatccacttcatcaacatgtttctgtttaactacagtgactcttccaacgcacccctctacaaacatcagcaagaagtccaaagtttctttgtggttatggctttgatttctgtgccgtggatgcttctgattaagccgtttattcttagagccagtcatcggaaatcccagctgcaggcatccaggatccaagaagatgccactgagaacattgaaggtgatagctccagcccttctagccgttctggccagaggacttctgcagatacccacggggctctggacgaccatggagaagagttcaactttggagacgtctttgtccaccaagccatccacaccatcgagtactgcctgggctgcatttcaaacacagcctcctacctgcggctctgggccctcagcctggctcatgcacaactgtctgaagtgctctggactatggtgatgaacagcggccttcagacgcgaggctggggaggaatcgtcggggtttttattatttttgccgtatttgctgtcctgacagtagccatccttctgatcatggagggcctctctgctttcctgcacgccctgcgactgcactgggttgagttccagaacaagttctatgtcggggatggttacaagttttctccattctcctttaaacacatcctggatggcacagccgaggagtaggctgagggctgcacctcccacggtggtcaccatgccaatgaaggaagttcagtcttgtctttgatatcagcccctgcaaggcgctcaatgggaaggttgttcttggctcacctgaagcatgaaactgtgtattatttggacgtcagcctgtggatttgatacgacttaaccacgtcagaggaaggactttggcaagtgatattgtcttcatgtggggtattaattctcaaataataaagtaattgacaaatgaggggagaatgctaaacagatgtcttcttgcaatattttaaatattgtatttgagaaaataaacatctgagtcattc

SEQ ID NO: 40 - DNA, 2538 bp, Homo sapiens
ccctcggggctgcccctgctgcctgtgctgttcgctcttggggggcttctgctcctctccaatgcctcctgtgtcgggggggtcctctggcagcggagactcaggcgtcttgctgaggcactcaacttccccccacaccttcatcctggaaggtcggaagaggaccgagtcaggaacgaatatgaggagagccagtggacaggagagcgggacactcagagctccacggtcagcacaacagaggcagagccgtattaccgctccctgagggacttcagcccccagctgcccccgacgcaggaggaggtgtcttattcccgaggtttcacaggtgaagatgaggatatggccttccctgggcacttgtatgatgaggtagaaagaacgtaccccccgtctggagcctggggacccctctacgatgaagtgcagatgggaccctgggacctccactggcctgaagacacatatcaggatccaagaggaatctatgaccaggtggccggagacttggacactctggaacccgattctctgcccttcgagctgaggggacatctggtatggggtttcaaccatgttagccaggctggtctcaaactcctggcctcaagtgatccacccgcctcagcctcccaaagtgctgagattacagagtctcactctgtagtccaggttggagtgcagtggcgttatttcggctcactgcatcctctgcctcctggttcaagagattctcttgcctcagcctcccgcatagctgggattacagcaccttgggaggcagaggtgagcagatcacctcagggcactcaggattccccagtgaccaggtctggtcccccctccaggggctggcagtccctgagctttgatggcggggccttccaccttaagggcacaggagagctgacacgggccttgctggttctccggctgtgtgcctggcccccactcgtcactcacgggctgttgctccaggcctggtctcggcgactcctgggctcccggctctcaggcgcatttctccgagcatccgtctatgggcagtttgtggctggtgagacagcagaggaggtgaagggctgcgtgcagcagctgcggaccctcagcctccgaccactgctggcagtgcccactgaggaggagccggactctgctgccaagaggatgaggcttcaccatgttggccaggctggtcttgaactcctgaccccagcggcatctggctctgttgcccaggctggagtgcagtggagacaatcctctgacaggggaggaggaaaccaggctgctgcctccaggtcttcccttctccaggaggcagcattctccccaccatgcggaaggttgcagcttccagcccaacctgcctccagacacggtgctaggggccgaggaagcatgaaggcaaaatccctgacctcgaggcacttacttgcaagtcaggggcaagagacaataattaaaaccaaagtcagaatcccagcactttggaaggctgagcctgggcaacacagcaagaccccgtctcagcaaaacaaaagtcagtacgtaacaacactttgggaggccgatgtgggcagatcacttgagaacctccaggtctcctgcctcaatgctgagcagaaccagcacctccgggcctccctcagccgcctgcatcgggtggcacaggtaacccctcctgctggaaccagcacctccgggcctccctctgccgcctgcattgggtggcacagccgcctgcatcgggtggcacagtatgcccgggcccagcacgtgcggctcctggtggatgcggagtacacctcactgaaccctgcgctctcgctgctggtggctgccctggctgtgcgctggaacagcccgggtgaaggcgggccctgggtgtggaacacctaccaggcctgtctaaaggacacattcgagcggctggggagggatgcagaggctgcgcacagggccggcctggccttcggagtgaagctggtacgaggtgcatatctggacaaggagagagcggtggcccagctccatgggatggaagaccccactcagcctgactatgaggccaccagtgagctgaacagagcatctcccttcagttacagccgctgcctggaactgatgctgacgcacgtggcccgccatggccccatgtgccacctcatggtggcttcccacaatgaggaatctgttcgccaggcaaccaagcgcatgtgggagctgggcattcctctggatgggactgtctgtttcggacaacttctgggcatgtgtgaccacgtctctctagcactggggcaggccggctatgtagtgtataagtccattccctatggctccttggaggaggtaatcccctacctgatccggagggcccaggagaaccggagcgtgcttcagggtgcccgcagggaacaggagctgctcagccaagaactgtggcggcggctgctgccaggatgccgaaggataccccactagcacccctgagggggtcatgtggtcaataaaagtccttaggtgctgcct

SEQ ID NO: 41 - DNA, 4737 bp, Homo sapiens
gccccgggaagcgcagccatggctctgcggaggctgggggccgcgctgctgctgctgccgctgctcgccgccgtggaagaaacgctaatggactccactacagcgactgctgagctgggctggatggtgcatcctccatcagggtgggaagaggtgagtggctacgatgagaacatgaacacgatccgcacgtaccaggtgtgcaacgtgtttgagtcaagccagaacaactggctacggaccaagtttatccggcgccgtggcgcccaccgcatccacgtggagatgaagttttcggtgcgtgactgcagcagcatccccagcgtgcctggctcctgcaaggagaccttcaacctctattactatgaggctgactttgactcggccaccaagaccttccccaactggatggagaatccatgggtgaaggtggataccattgcagccgacgagagcttctcccaggtggacctgggtggccgcgtcatgaaaatcaacaccgaggtgcggagcttcggacctgtgtcccgcagcggcttctacctggccttccaggactatggcggctgcatgtccctcatcgccgtgcgtgtcttctaccgcaagtgcccccgcatcatccagaatggcgccatcttccaggaaaccctgtcgggggctgagagcacatcgctggtggctgcccggggcagctgcatcgccaatgcggaagaggtggatgtacccatcaagctctactgtaacggggacggcgagtggctggtgcccatcgggcgctgcatgtgcaaagcaggcttcgaggccgttgagaatggcaccgtctgccgaggttgtccatctgggactttcaaggccaaccaaggggatgaggcctgtacccactgtcccatcaacagccggaccacttctgaaggggccaccaactgtgtctgccgcaatggctactacagagcagacctggaccccctggacatgccctgcacaaccatcccctccgcgccccaggctgtgatttccagtgtcaatgagacctccctcatgctggagtggacccctccccgcgactccggaggccgagaggacctcgtctacaacatcatctgcaagagctgtggctcgggccggggtgcctgcacccgctgcggggacaatgtacagtacgcaccacgccagctaggcctgaccgagccacgcatttacatcagtgacctgctggcccacacccagtacaccttcgagatccaggctgtgaacggcgttactgaccagagccccttctcgcctcagttcgcctctgtgaacatcaccaccaaccaggcagctccatcggcagtgtccatcatgcatcaggtgagccgcaccgtggacagcattaccctgtcgtggtcccagccggaccagcccaatggcgtgatcctggactatgagctgcagtactatgagaaggagctcagtgagtacaacgccacagccataaaaagccccaccaacacggtcaccgtgcagggcctcaaagccggcgccatctatgtcttccaggtgcgggcacgcaccgtggcaggctacgggcgctacagcggcaagatgtacttccagaccatgacagaagccgagtaccagacaagcatccaggagaagttgccactcatcatcggctcctcggccgctggcctggtcttcctcattgctgtggttgtcatcgccatcgtgtgtaacagaagacgggggtttgagcgtgctgactcggagtacacggacaagctgcaacactacaccagtggccacatgaccccaggcatgaagatctacatcgatcctttcacctacgaggaccccaacgaggcagtgcgggagtttgccaaggaaattgacatctcctgtgtcaaaattgagcaggtgatcggagcaggggagtttggcgaggtctgcagtggccacctgaagctgccaggcaagagagagatctttgtggccatcaagacgctcaagtcgggctacacggagaagcagcgccgggacttcctgagcgaagcctccatcatgggccagttcgaccatcccaacgtcatccacctggagggtgtcgtgaccaagagcacacctgtgatgatcatcaccgagttcatggagaatggctccctggactcctttctccggcaaaacgatgggcagttcacagtcatccagctggtgggcatgcttcggggcatcgcagctggcatgaagtacctggcagacatgaactatgttcaccgtgacctggctgcccgcaacatcctcgtcaacagcaacctggtctgcaaggtgtcggactttgggctctcacgctttctagaggacgatacctcagaccccacctacaccagtgccctgggcggaaagatccccatccgctggacagccccggaagccatccagtaccggaagttcacctcggccagtgatgtgtggagctacggcattgtcatgtgggaggtgatgtcctatggggagcggccctactgggacatgaccaaccaggatgtaatcaatgccattgagcaggactatcggctgccaccgcccatggactgcccgagcgccctgcaccaactcatgctggactgttggcagaaggaccgcaaccaccggcccaagttcggccaaattgtcaacacgctagacaagatgatccgcaatcccaacagcctcaaagccatggcgcccctctcctctggcatcaacctgccgctgctggaccgcacgatccccgactacaccagctttaacacggtggacgagtggctggaggccatcaagatggggcagtacaaggagagcttcgccaatgccggcttcacctcctttgacgtcgtgtctcagatgatgatggaggacattctccgggttggggtcactttggctggccaccagaaaaaaatcctgaacagtatccaggtgatgcgggcgcagatgaaccagattcagtctgtggaggtttgacattcacctgcctcggctcacctcttcctccaagccccgccccctctgccccacgtgccggccctcctggtgctctatccactgcagggccagccactcgccaggaggccacgggccacgggaagaaccaagcggtgccagccacgagacgtcaccaagaaaacatgcaactcaaacgacggaaaaaaaaagggaatgggaaaaaagaaaacagatcctgggagggggcgggaaatacaaggaatattttttaaagaggattctcataaggaaagcaatgactgttcttgcgggggataaaaaagggcttgggagattcatgcgatgtgtccaatcggagacaaaagcagtttctctccaactccctctgggaaggtgacctggccagagccaagaaacactttcagaaaaacaaatgtgaaggggagagacaggggccgcccttggctcctgtccctgctgctcctctaggcctcactcaacaaccaagcgcctggaggacgggacagatggacagacagccaccctgagaacccctctgggaaaatctattcctgccaccactgggcaaacagaagaatttttctgtctttggagagtattttagaaactccaatgaaagacactgtttctcctgttggctcacagggctgaaaggggcttttgtcctcctgggtcagggagaacgcggggaccccagaaaggtcagccttcctgaggatgggcaacccccaggtctgcagctccaggtacatatcacgcgcacagcctggcagcctggccctcctggtgcccactcccgccagcccctgcctcgaggactgatactgcagtgactgccgtcagctccgactgccgctgagaagggttgatcctgcatctgggtttgtttacagcaattcctggactcgggggtattttggtcacagggtggttttggtttagggggtttgtttgttgggttgttttttgttttttggttttttttaatgacaatgaagtgacactttgacatttcctaccttttgaggacttgatccttctccaggaagaaggtgctttctgcttactgacttaggcaatacaccaagggcgagattttatatgcacatttctggatttttttatacggttttcattgacactcttccctcctcccacctgccaccaggcctcaccaaagcccactgccatggggccatctgggccattcagagactggagtgagatttgggtgtggagggggaggcgccaaggtggaggagcttcccactccaggactgttgatgaaagggacagattgaggaggaagtgggctctgaggctgcagggctggaagtccttgcccacttcccactctcctgccccaatctatctagtacttcccaggcaaataggcccctttgaggctcctgagtgccctcagatggtcaaaacccagttttccctctgggagcctaaaccaggctgcatcggaggccaggacccggatcattcactgtgataccctgccctccagagggtgcgctcagagacacgggcaagcatgcctcttcccttccctggagagaaagtgtgtgatttctctcccacctccttccccccaccagacctttgctgggcctaaaggtcttggccatggggacgccctcagtctagggatctggccacagactccctcctgtgaaccaacacagacacccaagcagagcaatcagttagtgaattgaatggaaataaacgctttagttataa

SEQ ID NO: 42 - DNA, 1505 bp, Homo sapiens
agctgcggcgctgggctggcggcggcgagtccacgtgctccccgcggccggttgaaaccgttggcgggcgctggctgagaggcaatgtttgctgtcttccattggagtgactgaatttctacatgacggctttttgacaagacttaaaacctgtcttggatagagaatatttagccatttacctaaaaatggtattttttacatgcaatgcatgtggtgaatcagtgaagaaaatacaagtggaaaagcatgtgtctgtttgcagaaactgtgaatgcctttcttgcattgactgcggtaaagatttctggggcgatgactataaaaaccacgtgaaatgcataagtgaagatcagaagtatggtggcaaaggctatgaaggtaaaacccacaaaggcgacatcaaacagcaggcgtggattcagaaaattagtgaattaataaagagacccaatgtcagccccaaagtgagagaacttttagagcaaattagtgcttttgacaacgttcccaggaaaaaggcaaaatttcagaattggatgaagaacagtttaaaagttcataatgaatccattctggaccaggtgtggaatatcttttctgaagcttccaacagcgaaccagtcaataaggaacaggatcaacggccactccacccagtggcaaatccacatgcagaaatctccaccaaggttccagcctccaaagtgaaagacgccgtggaacagcaaggggaggtgaagaagaataaaagagaaagaaaggaagaacggcagaagaaaaggaaaagagaaaagaaagaactaaagttagaaaaccaccaggaaaactcaaggaatcagaagcctaagaagcgcaaaaagggacaggaggctgaccttgaggctggtggggaggaagtccctgaggccaatggctctgcagggaagaggagcaagaagaagaagcagcgcaaggacagcgccagtgaggaagaggcacgcgtgggcgcagggaagaggaagcggaggcactcggaagttgaaacagattctaagaagaaaaagatgaagctcccagagcatcctgagggcggagaaccagaagacgatgaggctcctgcaaaaggtaaattcaactggaagggaactattaaagcaattctgaaacaggccccagacaatgaaataaccatcaaaaagctaaggaaaaaggttttagctcagtactacacagtgacagatgagcatcacagatccgaagaggaactcctggtcatctttaacaagaaaatcagcaagaaccctacctttaagttattaaaggacaaagtcaagcttgtgaaatgaacatttgtgtatttaaaaattgaatccattctgctgacttcttcctttcactgctgtttataaaatgtgtaatgaattctaacaactcaaattttgctttttgaagctgtatttttaagttaagaaaatatatttttggtataacttttatgagaaaaataaaatatattctggtcc

SEQ ID NO: 43 - DNA, 557 bp, Homo sapiens
cctcctgggagggagctgaagccgctcgcaagactcccgtagtccccacctctctcagcttccggctggtagtagttccgcttcctgtccgactgtggtgtctttgctgagggtcacattgagctgcaggttgaatccggggtgcctttaggattcagcaccatggcggaagacatggagaccaaaatcaagaactacaagaccgccccttttgacagccgcttccccaaccagaaccagactagaaactgctggcagaactacctggacttccaccgctgtcagaaggcaatgaccgctaaaggaggcgatatctctgtgtgcgaatggtaccagcgtgtgtaccagtccctctgccccacatcctgggtcacagactgggatgagcaacgggctgaaggcacgtttcccgggaagatctgaactggctgcatctccctttcctctgtcctccatccttctcccaggatggtgaagggggacctggtacccagtgatccccaccccaggatcctaaatcatgacttacctgctaataaaaactcattggaaaagtg

SEQ ID NO: 44 - DNA, 662 bp, Homo sapiens
gggggggggagcacaaagttgggagtgacaccagagcctcctgcaagatgcttctgattctgctgtcagtggccctgctggccttcagctcagctcaggatttaaatgaagatgtcagccaggaagatgttcccctcgtaatatcagatggaggagactctgagcagttcatagatgaggagcgtcagggaccacctttgggaggacagcaatctcaaccctctgctggtgatgggaaccaggatgatggccctcagcagggaccaccccaacaaggaggccagcagcaacaaggtccaccacctcctcagggaaagccacaaggaccaccccaacagggaggccatccccctcctcctcaaggaaggccacaaggaccaccccaacagggaggccatccccgtcctcctcgaggaaggccacaaggaccaccccaacagggaggccatcagcaaggtcctcccccacctcctcctggaaagccccagggaccacctccccaagggggccgcccacaaggacctccacaggggcagtctcctcagtaatccaggattcaatgacaggaagtgaataagaagataacagtgtttcaaatgccgtgaaacatggcatcatgctctaacttcagtataccaataaaacaatcagcttgcaatttc

SEQ ID NO: 45 - DNA, 2232 bp, Homo sapiens
cttccccttctctgccctgctccaggcaccaggctctttccccttcagtgtctcagaggaggggacggcagcaccatggacccccgcttgtccactgtccgccagacctgctgctgcttcaatgtccgcatcgcaaccaccgccctggccatctaccatgtgatcatgagcgtcttgttgttcatcgagcactcagtagaggtggcccatggcaaggcgtcctgcaagctctcccagatgggctacctcaggatcgctgacctgatctccagcttcctgctcatcaccatgctcttcatcatcagcctgagcctactgatcggcgtagtcaagaaccgggagaagtacctgctgcccttcctgtccctgcaaatcatggactatctcctgtgcctgctcaccctgctgggctcctacattgagctgcccgcctacctcaagttggcctcccggagccgtgctagctcctccaagttccccctgatgacgctgcagctgctggacttctgcctgagcatcctgaccctctgcagctcctacatggaagtgcccacctatctcaacttcaagtccatgaaccacatgaattacctccccagccaggaggatatgcctcataaccagttcatcaagatgatgatcatcttttccatcgccttcatcactgtccttatcttcaaggtctacatgttcaagtgcgtgtggcggtgctacagattgatcaagtgcatgaactcggtggaggagaagagaaactccaagatgctccagaaggtggtcctgccgtcctacgaggaagccctgtctttgccatcgaagaccccagaggggggcccagcaccacccccatactcagaggtgtgaccctcgccaggccccagccccagtgctgggaggggtggagctgcctcataatctgcttttttgctttggtggcccctgtggcctgggtgggccctcccgcccctccctggcaggacaatctgcttgtgtctccctcgctggcctgctcctcctgcagggcctgtgagctgctcacaactgggtcaacgctttaggctgagtcactcctcgggtctctccataattcagcccaacaatgcttggtttatttcaatcagctctgacacttgtttagacgattggccattctaaagttggtgagtttgtcaagcaactatcgacttgatcagttcagccaagcaactgacaaatcaaaaacccacttgtcagttcagtaaaataatttggtcaaacaacagtctattgcattgatttataaatagttgtcagttcacatagcaatttaatcaagtaatcattaattagttaccccctatatataaatatatgtaatcaatttcttcaaatagcttgcttacatgataatcaattagccaaccatgagtcatttagaatagtgataaatagaatacacagaatagtgatgaaattcaatttaaaaaatcacgttagcctccaaaccatttaattcaaatgaacccatcaactggatgccaactctggcgaatgtaggacctctgagtggctgtataattgttaattcaaatgaaattcatttaaacagttgacaaactgtcattcaacaattagctccaggaaataacagttatttcatcataaaacagtcccttcaaacacacaattgttctgctgaagagttgtcatcaacaatccaatgctcacctattcagttgctctgtggtcagtgtggctgcatagcagtggattccatgaaaggagtcattttagtgatgagctgccagtccattcccaggccaggctgtcgctggccatccattcagtcgattcagtcataggcgaatctgttctgcccgaggcttgtggtcaagcaaaaattcagccctgaaatcaggcacatctgttcgttggactaaacccacaggttagttcagtcaaagcaggcaacccccttgtgggcactgaccctgccactggggtcatggcggttgtggcagctggggaggtttggccccaacagccctcctgtgcctgcttccctgtgtgtcggggtcctccagggagctgacccagaggtggaggccacggaggcagggtctctggggactgtcggggggtacagagggagaaggctctgcaagagctccctggcaatacccccttgtgtaattgctttgtgtgcgacagggaggaagtttcaataaagcaacaacaagcttcaaggaattc

SEQ ID NO: 46 - DNA, 3136 bp, Homo sapiens
gaagcgcccgccccggccggagccgccatgtaaccggcgccgcccggagcccgagccgcgcgggccccagcgacccgcccgccatgggggacgaggacgacgatgagagctgcgccgtggagctgcggatcacagaagccaacctgaccgggcacgaggagaaggtgagcgtggagaacttcgagctgctcaaggtgctgggcacgggagcctacggcaaggtgttcctggtgcggaaggcgggcgggcacgacgcggggaagctgtacgccatgaaggtgctgcgcaaggcggcgctggtgcagcgcgccaagacgcaagagcacacgcgcaccgagcgctcggtgctggagctggtgcgccaggcgcccttcctggtcacgctgcactacgctttccagacggatgccaagctgcacctcatcctggactatgtgagcggcggggagatgttcacccacctctaccagcgccagtacttcaaggaggctgaggtgcgcgtgtatgggggtgagatcgtgctggccctggaacacctgcacaagctcggcatcatttaccgagacctgaaactggagaatgtgctgctggactccgagggccacattgtcctcacggacttcgggctgagcaaggagttcctgacggaggagaaagagcggaccttctccttctgtggcaccatcgagtacatggcccccgaaatcatccgtagcaagacggggcatggcaaggctgtggactggtggagcctgggcatcttgctcttcgagctgctgacgggggcctcgcccttcaccctggagggcgagaggaacacgcaggctgaggtgtctcgacggatcctgaagtgctcccctcccttcccccctcggatcgggcccgtggcgcaggacctgctgcagcggctgctttgtaaggatcctaagaagcgattgggcgcggggccccagggggcacaagaagtccggaaccatcccttcttccagggcctcgattgggtggctctggctgccaggaagattccagccccattccggccccaaatccgctcagagctggatgtgggcaactttgcggaggaattcactcggctggagcctgtctactcaccccctggcagccccccacctggggacccccgaatctttcagggatactcctttgtggcaccctccattctctttgaccacaacaacgcggtgatgaccgatgggctggaagcgcctggtgctggagaccggccaggtcgggcagcggtggccaggagcgctatgatgcaggactcgcccttcttccagcagtacgagctggacctgcgggagcctgcgctgggccagggcagcttttctgtgtgtcgccgctgccgccagcgccagagcggccaggagttcgcagtcaagatcctcagtcgcaggctggaggcgaacacgcagcgcgaagtggctgccctgcgcctgtgccagtcacaccccaacgtggtgaatctgcacgaggtgcatcacgaccagctgcacacgtacctggtcctggagctgctgcggggcggggagctgctggagcacatccgcaagaagcggcacttcagcgagtcggaagcaagccagatcctgcgcagcctcgtgtcggccgtgagcttcatgcacgaggaggcgggcgtggtgcaccgcgacctcaagccggagaacatcctgtacgccgacgacacgcccggggccccggtgaaaatcatcgacttcgggttcgcgcggttgcggccgcagagtcccggggtgcccatgcagacgccctgcttcacgctgcagtacgctgcccccgagctgctggcgcagcagggctacgacgagtcctgcgacctctggagcctgggcgtcattctgtacatgatgctgtcggggcaggtccccttccagggggcctctggccagggcgggcagagccaggcggccgagatcatgtgcaaaatccgcgaggggcgcttctcccttgacggggaggcctggcagggtgtatccgaggaagccaaggagctggtccgagggctcctgaccgtggaccccgccaagcggctgaagctcgagggactgcggggcagctcgtggctgcaggacggcagcgcgcgctcctcgcccccgctccggacgcccgacgtgctcgagtcctctgggcccgcagtgcgctcgggtctcaacgccaccttcatggcattcaaccggggcaagcgggagggcttcttcctgaagagcgtggagaatgcacccctggccaagcggcggaagcagaagctgcggagcgccaccgcctcccgccggggctcccctgcaccagccaacccgggccgagcccccgtcgcctccaaaggggccccccgccgagccaacggccccctgcccccctcctaatccccaccactgtgacccccttccctcataggggctgtgacctgggagcccggctcactcccggaggcctctgcctgcggctgacctgatccccaagggactgtcctttcctctcctaccccaccccactcccagacagagcagaagtatttttataagcagagaattttttatgtcttaccagatagagttgcagggaagggggggcctgctggggagtggggtttggggggccctctcccaggacactgcctcttctgggcagaaggcccctccagggggactgctccaacaggaaagagcccctcccccacttctaagcactgagttaggagtgctaactcctaaactgggaccccctaccctgttctcccctgaggccccgttcctgggaggggcacccctcaactgtcactttatggactgtctgtgcaattacgtccaccaaagacccgtgttgggggtactgaaggagaggccctgggggaccctctgaagcatttctgcctcactttatgtcatctgcttctcccctgttggggctaaggaaggagataggtggctcctaaaagaggaggccatcttctcacccaccccttcctctttggcacagctactcctggctgggggtggggccttgggggtctgggctgggcatccatggtcactgcctcagcccagccaggctgtgcctttgactttaaaataaaagtccacccagtgctgtgtgtggc

SEQ ID NO: 47 - DNA, 6918 bp, Homo sapiens
ctttgacctgcagtagagcctacgtcagaggctggcgcaaacagaagtgcagcggtggcggcggctggttgcgggccggcggcgggctggcggagatggaggatcttgttcaagatggggtggcttcaccagctacccctgggaccgggaaatctaagctggaaacattgcccaaagaagacctcatcaagtttgccaagaaacagatgatgctaatacagaaagctaaatcaaggtgtacagaattggagaaagaaattgaagaactcagatcaaaacctgttactgaaggaactggtgatattattaaggcattaactgaacgtctggatgctcttcttctggaaaaagcagagactgagcaacagtgtctttctctgaaaaaggaaaatataaaaatgaagcaagaggttgaggattctgtaacaaagatgggagatgcacataaggagttggaacaatcacatataaactatgtgaaagaaattgaaaatttgaaaaatgagttgatggcagtacgttccaaatacagtgaagacaaagctaacttacaaaagcagctggaagaagcaatgaatacgcaattagaactttcagaacaacttaaatttcagaacaactctgaagataatgttaaaaaactacaagaagagattgagaaaattaggccaggctttgaggagcaaattttatatctgcaaaagcaattagacgctaccactgatgaaaagaaggaaacagttactcaactccaaaatatcattgaggctaattctcagcattaccaaaaaaatattaatagtttgcaggaagagcttttacagttgaaagctatacaccaagaagaggtgaaagagttgatgtgccagattgaagcatcagctaaggaacatgaagcagagataaataagttgaacgagctaaaagagaacttagtaaaacaatgtgaggcaagtgaaaagaacatccagaagaaatatgaatgtgagttagaaaatttaaggaaagccacctcaaatgcaaaccaagacaatcagatatgttctattctcttgcaagaaaatacatttgtagaacaagtagtaaatgaaaaagtcaaacacttagaagataccttaaaagaacttgaatctcaacacagtatcttaaaagatgaggtaacttatatgaataatcttaagttaaaacttgaaatggatgctcaacatataaaggatgagttttttcatgaacgggaagacttagagtttaaaattaatgaattattactagctaaagaagaacagggctgtgtaattgaaaaattaaaatctgagctagcaggtttaaataaacagttttgctatactgtagaacagcataacagagaagtacagagtcttaaggaacaacatcaaaaagaaatatcagaactaaatgagacatttttgtcagattcagaaaaagaaaaattaacattaatgtttgaaatacagggtcttaaggaacagtgtgaaaacctacagcaagaaaagcaagaagcaattttaaattatgagagtttacgagagattatggaaattttacaaacagaactgggggaatctgctggaaaaataagtcaagagttcgaatcaatgaagcaacagcaagcatctgatgttcatgaactgcagcagaagctcagaactgcttttactgaaaaagatgcccttctcgaaactgtgaatcgcctccagggagaaaatgaaaagttactatctcaacaagaattggtaccagaacttgaaaataccataaagaaccttcaagaaaagaatggagtatacttacttagtctcagtcaaagagataccatgttaaaagaattagaaggaaagataaattctcttactgaggaaaaagatgattttataaataaactgaaaaattcccatgaagaaatggataatttccataagaaatgtgaaagggaagaaagattgattcttgaacttgggaagaaagtagagcaaacaatccagtacaacagtgaactagaacaaaaggtaaatgaattaacaggaggactagaggagactttaaaagaaaaggatcaaaatgaccaaaaactagaaaaacttatggttcaaatgaaagttctctctgaagacaaagaagtattgtcagctgaagtgaagtctctttatgaggaaaacaataaactcagttcagaaaaaaaacagttgagtagggatttggaggtttttttgtctcaaaaagaagatgttatccttaaagaacatattactcaattagaaaagaaacttcagttaatggttgaagagcaagataatttaaataaactgcttgaaaatgagcaagttcagaagttatttgttaaaactcagttgtatggttttcttaaagaaatgggatcagaagtttcagaagacagtgaagagaaagatgttgttaatgtcctacaggcagtcggtgaatccttggcaaaaataaatgaggaaaaatgcaacctggcttttcagcgtgatgaaaaagtattagagttagaaaaagagattaagtgccttcaagaagagagtgtagttcagtgtgaagaacttaagtctttattgagagactatgagcaagagaaagttctcttaaggaaagagttagaagaaatacagtcagaaaaagaggccctgcagtctgatcttctagaaatgaagaatgctaatgaaaaaacaaggcttgaaaatcagaatcttttaattcaagttgaagaagtatctcaaacatgtagcaaaagtgaaatccataatgaaaaagaaaaatgttttataaaggaacatgaaaacctaaagccactactagaacaaaaagaattacgagataggagagcagagttgatactattaaaggattccttagcaaaatcaccttctgtaaaaaatgatcctctgtcttcagtaaaagagttggaagaaaaaatagaaaatctggaaaaagaatgcaaagaaaaggaggagaaaataaataagataaaattagttgccgtaaaggcaaagaaagaactagattccagcagaaaagagacccagactgtgaaggaagaacttgaatctcttcgatcagaaaaggaccagttatctgcttccatgagagatctcattcaaggagcagaaagctataagaatcttttattagaatatgaaaagcagtcagagcaactggatgtggaaaaagaacgtgctaataattttgagcatcgtattgaagaccttacaagacaattaagaaattcgactttgcagtgtgaaacaataaattctgataatgaagatctcctggctcgtattgagacattacagtctaatgccaaattattagaagtacagattttagaagtccagagagccaaagcaatggtagacaaagaattagaagctgaaaaacttcagaaagaacagaagataaaggaacatgccactactgtaaatgaacttgaagaacttcaggtacaacttcaaaaggaaaagaaacagcttcagaaaaccatgcaagaattagagctggttaaaaaggatgcccaacaaaccacattgatgaatatggaaatagctgattatgaacgtttgatgaaagaactaaatcaaaagttaactaataaaaacaacaagatagaagatttggagcaagaaataaaaattcaaaaacagaaacaagaaaccctacaagaagaaataacttcattacagtcttcagtacaacaatatgaagaaaaaaacaccaaaatcaagcaattgcttgtgaaaaccaaaaaggaactggcagattcaaagcaagcagaaactgatcacttaatacttcaagcatctttaaaaggtgagctggaggcaagccagcagcaagtagaagtctataaaatacagctggctgaaataacatcagagaagcacaaaatccacgagcacctgaaaacctctgcggaacagcaccagcgtacgctaagtgcataccagcagagagtgacagcactacaggaagagtgccgtgctgccaaggcagaacaagctactgtaacctctgaattcgagagctacaaagtccgagttcataatgttctaaaacaacagaaaaataaatctatgtctcaggctgaaactgagggcgctaaacaagaaagggaacatctggaaatgctgattgaccagctaaaaatcaaattacaagatagccaaaataacttacagattaatgtatctgaacttcaaacattgcagtctgaacatgatacactgctagaaaggcacaacaagatgctgcaggaaactgtgtccaaagaggcggaactccgggaaaaattgtgttcaatacagtcagagaacatgatgatgaaatctgaacatacacagactgtgagtcagctaacatcccagaacgaggtccttcgaaatagcttccgagatcaagtgcgacatttgcaggaagaacacagaaagacagtggagacattacagcagcagctctccaagatggaagcacagctcttccagcttaagaatgaaccgaccacaagaagcccagtttcctctcaacaatctttgaagaaccttcgagaaaggagaaacacagacctcccgcttctagacatgcacactgtaacccgggaagagggagaaggcatggagacaactgatacggagtctgtgtcttccgccagcacatacacacagtctttagagcagctgcttaactctcccgaaactaaacttgagcctccattatggcatgctgaatttaccaaagaagaattggttcagaagctcagttccaccacaaaaagtgcagatcacttaaacggcctgcttcgggaaacagaagcaaccaatgcaattcttatggagcaaattaagcttctcaaaagtgaaataagaagattggaaaggaatcaagagcgagagaagtctgcagctaacctggaatacttgaagaacgtcttgctgcagttcattttcttgaaaccaggtagtgaaagagagagacttcttcctgttataaatacgatgttgcagctcagccctgaagaaaagggaaaacttgctgcggttgctcaaggtgaggaagaaaatgcttcccgttcttctggatgggcatcctatcttcatagttggtctggacttcgataggttgatggaaggaatatttttattaaccaaatagaatctatttacaaaaatggttcacgtatattaccacaattcttttgtcaaaaagtgtgtatatatgtttgcatctacatatatttgtacatctatatgacagatgtattttaaaagtttcatcttgaagtaaaagtacaacagcttgaagtgttgatagcaggccacagccctctaactcatgtgatttcccatgcatgctgccagaataaaaccaccaggaatgaattcactccccacttctctggaacctcaggacccgcccatttctcggcagtactgtgaattttgaagttaaactaaattttggtaccataccaactggaatttaggctttaaaaataatgtttcaaggccaggtgtggtgattcatgcctgaaatcccactactttgggaggctgaggctggagaattgcttgaggctagtgagctgtgactcccactgcactccagctcggggaacagagcgagaccttgtctctaaaaataatagtaataaaataaaaataacgttttatgactatttattgcaaggtcagagttacagattgttataaattgttgagaaatttttgtgattagaatatgaaggaaaaagctttgttggtaaaagtgacatgttaaggggctatgaagtaaatatgctgcagttaattatgctaagttaaaatacagtttagttatttgctttaaaataaactcttctttttttctttaaagtatactatctcaaaactcattatgttgtcagagccctagagctggctagtgtaacactgactatgagtaggtgggcccacacttgagttgaggtgatttcatggtgtctttccaggctcttgatagggtgtcactgcatgcaagccatgaatctgttttgagaatcctctccattttcccaaataaaaacctatcacaacagtgactatatcactcagcattggatctaaatataaaagtggtgctttcagtgtttttggcagatagtgttccataagctttccatcagaagggattttagacaccttagaggtccgtgctacatcgtcacagttcctccgaataaccttaggtggtagtgttacttgcctttgacacctctgcatatgttttaatgactagatccaaactgtgttgttcttaaatcaaaaattggataatttgtaatatttatgtgttaatcacacagtatgctctctgaagttctcttaagccttcagtttatactcttaatttaattttctttctgagctggagaactggctttgcactttggttacacagaacattggtttccaattcagtttaactgaaatttgctgctgatatgttgagtttgttctttaaaaaatagctcatatatctcatctttcctcctgtcttagaagaacagacctaactagtgaatgtattaatgaaaatgcatctatttcagagctgacatgaagagtttagtttttttactttataaactgtgaatatgagtatgccagctgcatacgatgtaactaatcatatttaaatatatttcactttctctttgactttagaccttttgaagtctgtataaacttgttttgaaatatagtctctgcttacgaatgtcataacaaaataattttttgcatgataaaaaattactttgattacaaaaggcatattctttcatggtttctgcaatgagaggaagtgtaatgattattttaatatttctattaaatatgtttaactgta

SEQ ID NO: 48 - DNA, 6773 bp, Homo sapiens
cggccccagaaaacccgagcgagtagggggcggcgcgcaggagggaggagaactgggggcgcgggaggctggtgggtgtcgggggtggagatgtagaagatgtgacgccgcggcccggcgggtgccagattagcggacgcgctgcccgcggttgcaacgggatcccgggcgctgcagcttgggaggcggctctccccaggcggcgtccgcggagacacccatccgtgaaccccaggtcccgggccgccggctcgccgcgcaccaggggccggcggacagaagagcggccgagcggctcgaggctgggggaccgcgggcgcggccgcgcgctgccgggcgggaggctggggggccggggccggggccgtgccccggagcgggtcggaggccggggccggggccgggggacggcggctccccgcgcggctccagcggctcggggatcccggccgggccccgcagggaccatggcagccgggagcatcaccacgctgcccgccttgcccgaggatggcggcagcggcgccttcccgcccggccacttcaaggaccccaagcggctgtactgcaaaaacgggggcttcttcctgcgcatccaccccgacggccgagttgacggggtccgggagaagagcgaccctcacatcaagctacaacttcaagcagaagagagaggagttgtgtctatcaaaggagtgtgtgctaaccgttacctggctatgaaggaagatggaagattactggcttctaaatgtgttacggatgagtgtttcttttttgaacgattggaatctaataactacaatacttaccggtcaaggaaatacaccagttggtatgtggcactgaaacgaactgggcagtataaacttggatccaaaacaggacctgggcagaaagctatactttttcttccaatgtctgctaagagctgattttaatggccacatctaatctcatttcacatgaaagaagaagtatattttagaaatttgttaatgagagtaaaagaaaataaatgtgtatagctcagtttggataattggtcaaacaattttttatccagtagtaaaatatgtaaccattgtcccagtaaagaaaaataacaaaagttgtaaaatgtatattctcccttttatattgcatctgctgttacccagtgaagcttacctagagcaatgatctttttcacgcatttgctttattcgaaaagaggcttttaaaatgtgcatgtttagaaacaaaatttcttcatggaaatcatatacattagaaaatcacagtcagatgtttaatcaatccaaaatgtccactatttcttatgtcattcgttagtctacatgtttctaaacatataaatgtgaatttaatcaattcctttcatagttttataattctctggcagttccttatgatagagtttataaaacagtcctgtgtaaactgctggaagttcttccacagtcaggtcaattttgtcaaacccttctctgtacccatacagcagcagcctagcaactctgctggtgatgggagttgtattttcagtcttcgccaggtcattgagatccatccactcacatcttaagcattcttcctggcaaaaatttatggtgaatgaatatggctttaggcggcagatgatatacatatctgacttcccaaaagctccaggatttgtgtgctgttgccgaatactcaggacggacctgaattctgattttataccagtctcttcaaaaacttctcgaaccgctgtgtctcctacgtaaaaaaagagatgtacaaatcaataataattacacttttagaaactgtatcatcaaagattttcagttaaagtagcattatgtaaaggctcaaaacattaccctaacaaagtaaagttttcaatacaaattctttgccttgtggatatcaagaaatcccaaaatattttcttaccactgtaaattcaagaagcttttgaaatgctgaatatttctttggctgctacttggaggcttatctacctgtacatttttggggtcagctctttttaacttcttgctgctctttttcccaaaaggtaaaaatatagattgaaaagttaaaacattttgcatggctgcagttcctttgtttcttgagataagattccaaagaacttagattcatttcttcaacaccgaaatgctggaggtgtttgatcagttttcaagaaacttggaatataaataattttataattcaacaaaggttttcacattttataaggttgatttttcaattaaatgcaaatttgtgtggcaggatttttattgccattaacatatttttgtggctgctttttctacacatccagatggtccctctaactgggctttctctaattttgtgatgttctgtcattgtctcccaaagtatttaggagaagccctttaaaaagctgccttcctctaccactttgctggaaagcttcacaattgtcacagacaaagatttttgttccaatactcgttttgcctctatttttcttgtttgtcaaatagtaaatgatatttgcccttgcagtaattctactggtgaaaaacatgcaaagaagaggaagtcacagaaacatgtctcaattcccatgtgctgtgactgtagactgtcttaccatagactgtcttacccatcccctggatatgctcttgttttttccctctaatagctatggaaagatgcatagaaagagtataatgttttaaaacataaggcattcatctgccatttttcaattacatgctgacttcccttacaattgagatttgcccataggttaaacatggttagaaacaactgaaagcataaaagaaaaatctaggccgggtgcagtggctcatgcctatattccctgcactttgggaggccaaagcaggaggatcgcttgagcccaggagttcaagaccaacctggtgaaaccccgtctctacaaaaaaacacaaaaaatagccaggcatggtggcgtgtacatgtggtctcagatacttgggaggctgaggtgggagggttgatcacttgaggctgagaggtcaaggttgcagtgagccataatcgtgccactgcagtccagcctaggcaacagagtgagactttgtctcaaaaaaagagaaattttccttaataagaaaagtaatttttactctgatgtgcaatacatttgttattaaatttattatttaagatggtagcactagtcttaaattgtataaaatatcccctaacatgtttaaatgtccatttttattcattatgctttgaaaaataattatggggaaatacatgtttgttattaaatttattattaaagatagtagcactagtcttaaatttgatataacatctcctaacttgtttaaatgtccatttttattctttatgcttgaaaataaattatggggatcctatttagctcttagtaccactaatcaaaagttcggcatgtagctcatgatctatgctgtttctatgtcgtggaagcaccggatgggggtagtgagcaaatctgccctgctcagcagtcaccatagcagctgactgaaaatcagcactgcctgagtagttttgatcagtttaacttgaatcactaactgactgaaaattgaatgggcaaataagtgcttttgtctccagagtatgcgggagacccttccacctcaagatggatatttcttccccaaggatttcaagatgaattgaaatttttaatcaagatagtgtgctttattctgttgtattttttattattttaatatactgtaagccaaactgaaataacatttgctgttttataggtttgaagaacataggaaaaactaagaggttttgtttttatttttgctgatgaagagatatgtttaaatatgttgtattgttttgtttagttacaggacaataatgaaatggagtttatatttgttatttctattttgttatatttaataatagaattagattgaaataaaatataatgggaaataatctgcagaatgtgggtttcctggtgtttcctctgactctagtgcactgatgatctctgataaggctcagctgctttatagttctctggctaatgcagcagatactcttcctgccagtggtaatacgattttttaagaaggcagtttgtcaattttaatcttgtggatacctttatactcttagggtattattttatacaaaagccttgaggattgcattctattttctatatgaccctcttgatatttaaaaaacactatggataacaattcttcatttacctagtattatgaaagaatgaaggagttcaaacaaatgtgtttcccagttaactagggtttactgtttgagccaatataaatgtttaactgtttgtgatggcagtattcctaaagtacattgcatgttttcctaaatacagagtttaaataatttcagtaattcttagatgattcagcttcatcattaagaatatcttttgttttatgttgagttagaaatgccttcatatagacatagtctttcagacctctactgtcagttttcatttctagctgctttcagggttttatgaattttcaggcaaagctttaatttatactaagcttaggaagtatggctaatgccaacggcagtttttttcttcttaattccacatgactgaggcatatatgatctctgggtaggtgagttgttgtgacaaccacaagcactttttttttttttaaagaaaaaaaggtagtgaatttttaatcatctggactttaagaaggattctggagtatacttaggcctgaaattatatatatttggcttggaaatgtgtttttcttcaattacatctacaagtaagtacagctgaaattcagaggacccataagagttcacatgaaaaaaatcaattcatttgaaaaggcaagatgcaggagagaggaagccttgcaaacctgcagactgctttttgcccaatatagattgggtaaggctgcaaaacataagcttaattagctcacatgctctgctctcacgtggcaccagtggatagtgtgagagaattaggctgtagaacaaatggccttctctttcagcattcacaccactacaaaatcatcttttatatcaacagaagaataagcataaactaagcaaaaggtcaataagtacctgaaaccaagattggctagagatatatcttaatgcaatccattttctgatggattgttacgagttggctatataatgtatgtatggtattttgatttgtgtaaaagttttaaaaatcaagctttaagtacatggacatttttaaataaaatatttaaagacaatttagaaaattgccttaatatcattgttggctaaatagaataggggacatgcatattaaggaaaaggtcatggagaaataatattggtatcaaacaaatacattgatttgtcatgatacacattgaatttgatccaatagtttaaggaataggtaggaaaatttggtttctatttttcgatttcctgtaaatcagtgacataaataattcttagcttattttatatttccttgtcttaaatactgagctcagtaagttgtgttaggggattatttctcagttgagactttcttatatgacattttactatgttttgacttcctgactattaaaaataaatagtagaaacaattttcataaagtgaagaattatataatcactgctttataactgactttattatatttatttcaaagttcatttaaaggctactattcatcctctgtgatggaatggtcaggaatttgttttctcatagtttaattccaacaacaatattagtcgtatccaaaataacctttaatgctaaactttactgatgtatatccaaagcttctccttttcagacagattaatccagaagcagtcataaacagaagaataggtggtatgttcctaatgatattatttctactaatggaataaactgtaatattagaaattatgctgctaattatatcagctctgaggtaatttctgaaatgttcagactcagtcggaacaaattggaaaatttaaatttttattcttagctataaagcaagaaagtaaacacattaatttcctcaacatttttaagccaattaaaaatataaaagatacacaccaatatcttcttcaggctctgacaggcctcctggaaacttccacatatttttcaactgcagtataaagtcagaaaataaagttaacataactttcactaacacacacatatgtagatttcacaaaatccacctataattggtcaaagtggttgagaatatattttttagtaattgcatgcaaaatttttctagcttccatcctttctccctcgtttcttctttttttgggggagctggtaactgatgaaatcttttcccaccttttctcttcaggaaatataagtggttttgtttggttaacgtgatacattctgtatgaatgaaacattggagggaaacatctactgaatttctgtaatttaaaatattttgctgctagttaactatgaacagatagaagaatcttacagatgctgctataaataagtagaaaatataaatttcatcactaaaatatgctattttaaaatctatttcctatattgtatttctaatcagatgtattactcttattatttctattgtatgtgttaatgattttatgtaaaaatgtaattgcttttcatgagtagtatgaataaaattgattagtttgtgttttcttgtctcccg

SEQ ID NO: 49 - DNA, 3537 bp, Homo sapiens
cagaccccagttcgccgactaagcagaagaaagatcaaaaaccggaaaagaggagaagagcaaacaggcactttgaggaacaatcccctttaactccaagccgacagcggtctaggaattcaagttcagtgcctaccgaagacaaaggcgccccgagggagtggcggtgcgaccccagggcgtgggcccggccgcggagcccacactgcccggctgacccggtggtctcggaccatgtctcccgccccaagacccccccgttgtctcctgctccccctgctcacgctcggcaccgcgctcgcctccctcggctcggcccaaagcagcagcttcagccccgaagcctggctacagcaatatggctacctgcctcccggggacctacgtacccacacacagcgctcaccccagtcactctcagcggccatcgctgccatgcagaagttttacggcttgcaagtaacaggcaaagctgatgcagacaccatgaaggccatgaggcgcccccgatgtggtgttccagacaagtttggggctgagatcaaggccaatgttcgaaggaagcgctacgccatccagggtctcaaatggcaacataatgaaatcactttctgcatccagaattacacccccaaggtgggcgagtatgccacatacgaggccattcgcaaggcgttccgcgtgtgggagagtgccacaccactgcgcttccgcgaggtgccctatgcctacatccgtgagggccatgagaagcaggccgacatcatgatcttctttgccgagggcttccatggcgacagcacgcccttcgatggtgagggcggcttcctggcccatgcctacttcccaggccccaacattggaggagacacccactttgactctgccgagccttggactgtcaggaatgaggatctgaatggaaatgacatcttcctggtggctgtgcacgagctgggccatgccctggggctcgagcattccagtgacccctcggccatcatggcacccttttaccagtggatggacacggagaattttgtgctgcccgatgatgaccgccggggcatccagcaactttatgggggtgagtcagggttccccaccaagatgccccctcaacccaggactacctcccggccttctgttcctgataaacccaaaaaccccacctatgggcccaacatctgtgacgggaactttgacaccgtggccatgctccgaggggagatgtttgtcttcaaggagcgctggttctggcgggtgaggaataaccaagtgatggatggatacccaatgcccattggccagttctggcggggcctgcctgcgtccatcaacactgcctacgagaggaaggatggcaaattcgtcttcttcaaaggagacaagcattgggtgtttgatgaggcgtccctggaacctggctaccccaagcacattaaggagctgggccgagggctgcctaccgacaagattgatgctgctctcttctggatgcccaatggaaagacctacttcttccgtggaaacaagtactaccgtttcaacgaagagctcagggcagtggatagcgagtaccccaagaacatcaaagtctgggaagggatccctgagtctcccagagggtcattcatgggcagcgatgaagtcttcacttacttctacaaggggaacaaatactggaaattcaacaaccagaagctgaaggtagaaccgggctaccccaagtcagccctgagggactggatgggctgcccatcgggaggccggccggatgaggggactgaggaggagacggaggtgatcatcattgaggtggacgaggagggcggcggggcggtgagcgcggctgccgtggtgctgcccgtgctgctgctgctcctggtgctggcggtgggccttgcagtcttcttcttcagacgccatgggacccccaggcgactgctctactgccagcgttccctgctggacaaggtctgacgcccaccgccggcccgcccactcctaccacaaggactttgcctctgaaggccagtggcagcaggtggtggtgggtgggctgctcccatcgtcccgagccccctccccgcagcctccttgcttctctctgtcccctggctggcctccttcaccctgaccgcctccctccctcctgccccggcattgcatcttccctagataggtcccctgagggctgagtgggagggcggccctttccagcctctgcccctcaggggaaccctgtagctttgtgtctgtccagccccatctgaatgtgttgggggctctgcacttgaaggcaggaccctcagacctcgctggtaaaggtcaaatggggtcatctgctccttttccatcccctgacataccttaacctctgaactctgacctcaggaggctctgggcactccagccctgaaagccccaggtgtacccaattggcagcctctcactactctttctggctaaaaggaatctaatcttgttgagggtagagaccctgagacagtgtgagggggtggggactgccaagccaccctaagaccttgggaggaaaactcagagagggtcttcgttgctcagtcagtcaagttcctcggagatctgcctctgcctcacctaccccagggaacttccaaggaaggagcctgagccactggggactaagtgggcagaagaaacccttggcagccctgtgcctctcgaatgttagccttggatggggctttcacagttagaagagctgaaaccaggggtgcagctgtcaggtagggtggggccggtgggagaggcccgggtcagagccctgggggtgagcctgaaggccacagagaaagaaccttgcccaaactcaggcagctggggctgaggcccaaaggcagaacagccagagggggcaggaggggaccaaaaaggaaaatgaggacgtgcagcagcattggaaggctggggccgggcaggccaggccaagccaagcagggggccacagggtgggctgtggagctctcaggaagggccctgaggaaggcacacttgctcctgttggtccctgtccttgctgcccaggcagcgtggaggggaagggtagggcagccagagaaaggagcagagaaggcacacaaacgaggaatgaggggcttcacgagaggccacagggcctggctggccacgctgtcccggcctgctcaccatctcagtgaggggcaggagctggggctcgcttaggctgggtccacgcttccctggtgccagcacccctcaagcctgtctcaccagtggcctgccctctcgctcccccacccagcccacccattgaagtctccttgggccaccaaaggtggtggccatggtaccggggacttgggagagtgagacccagtggagggagcaagaggagagggatgtcgggggggtggggcacggggtaggggaaatggggtgaacggtgctggcagttcggctagatttctgtcttgtttgtttttttgttttgtttaatgtatatttttattataattattatatatgaattcc

SEQ ID NO: 50 - DNA, 4624 bp, Homo sapiens
ggaggaggtggaggaggagggctgcttgaggaagtataagaatgaagttgtgaagctgagattcccctccattgggaccggagaaaccaggggagccccccgggcagccgcgcgccccttcccacggggccctttactgcgccgcgcgcccggcccccacccctcgcagcaccccgcgccccgcgccctcccagccgggtccagccggagccatggggccggagccgcagtgagcaccatggagctggcggccttgtgccgctgggggctcctcctcgccctcttgccccccggagccgcgagcacccaagtgtgcaccggcacagacatgaagctgcggctccctgccagtcccgagacccacctggacatgctccgccacctctaccagggctgccaggtggtgcagggaaacctggaactcacctacctgcccaccaatgccagcctgtccttcctgcaggatatccaggaggtgcagggctacgtgctcatcgctcacaaccaagtgaggcaggtcccactgcagaggctgcggattgtgcgaggcacccagctctttgaggacaactatgccctggccgtgctagacaatggagacccgctgaacaataccacccctgtcacaggggcctccccaggaggcctgcgggagctgcagcttcgaagcctcacagagatcttgaaaggaggggtcttgatccagcggaacccccagctctgctaccaggacacgattttgtggaaggacatcttccacaagaacaaccagctggctctcacactgatagacaccaaccgctctcgggcctgccacccctgttctccgatgtgtaagggctcccgctgctggggagagagttctgaggattgtcagagcctgacgcgcactgtctgtgccggtggctgtgcccgctgcaaggggccactgcccactgactgctgccatgagcagtgtgctgccggctgcacgggccccaagcactctgactgcctggcctgcctccacttcaaccacagtggcatctgtgagctgcactgcccagccctggtcacctacaacacagacacgtttgagtccatgcccaatcccgagggccggtatacattcggcgccagctgtgtgactgcctgtccctacaactacctttctacggacgtgggatcctgcaccctcgtctgccccctgcacaaccaagaggtgacagcagaggatggaacacagcggtgtgagaagtgcagcaagccctgtgcccgagtgtgctatggtctgggcatggagcacttgcgagaggtgagggcagttaccagtgccaatatccaggagtttgctggctgcaagaagatctttgggagcctggcatttctgccggagagctttgatggggacccagcctccaacactgccccgctccagccagagcagctccaagtgtttgagactctggaagagatcacaggttacctatacatctcagcatggccggacagcctgcctgacctcagcgtcttccagaacctgcaagtaatccggggacgaattctgcacaatggcgcctactcgctgaccctgcaagggctgggcatcagctggctggggctgcgctcactgagggaactgggcagtggactggccctcatccaccataacacccacctctgcttcgtgcacacggtgccctgggaccagctctttcggaacccgcaccaagctctgctccacactgccaaccggccagaggacgagtgtgtgggcgagggcctggcctgccaccagctgtgcgcccgagggcactgctggggtccagggcccacccagtgtgtcaactgcagccagttccttcggggccaggagtgcgtggaggaatgccgagtactgcaggggctccccagggagtatgtgaatgccaggcactgtttgccgtgccaccctgagtgtcagccccagaatggctcagtgacctgttttggaccggaggctgaccagtgtgtggcctgtgcccactataaggaccctcccttctgcgtggcccgctgccccagcggtgtgaaacctgacctctcctacatgcccatctggaagtttccagatgaggagggcgcatgccagccttgccccatcaactgcacccactcctgtgtggacctggatgacaagggctgccccgccgagcagagagccagccctctgacgtccatcatctctgcggtggttggcattctgctggtcgtggtcttgggggtggtctttgggatcctcatcaagcgacggcagcagaagatccggaagtacacgatgcggagactgctgcaggaaacggagctggtggagccgctgacacctagcggagcgatgcccaaccaggcgcagatgcggatcctgaaagagacggagctgaggaaggtgaaggtgcttggatctggcgcttttggcacagtctacaagggcatctggatccctgatggggagaatgtgaaaattccagtggccatcaaagtgttgagggaaaacacatcccccaaagccaacaaagaaatcttagacgaagcatacgtgatggctggtgtgggctccccatatgtctcccgccttctgggcatctgcctgacatccacggtgcagctggtgacacagcttatgccctatggctgcctcttagaccatgtccgggaaaaccgcggacgcctgggctcccaggacctgctgaactggtgtatgcagattgccaaggggatgagctacctggaggatgtgcggctcgtacacagggacttggccgctcggaacgtgctggtcaagagtcccaaccatgtcaaaattacagacttcgggctggctcggctgctggacattgacgagacagagtaccatgcagatgggggcaaggtgcccatcaagtggatggcgctggagtccattctccgccggcggttcacccaccagagtgatgtgtggagttatggtgtgactgtgtgggagctgatgacttttggggccaaaccttacgatgggatcccagcccgggagatccctgacctgctggaaaagggggagcggctgccccagccccccatctgcaccattgatgtctacatgatcatggtcaaatgttggatgattgactctgaatgtcggccaagattccgggagttggtgtctgaattctcccgcatggccagggacccccagcgctttgtggtcatccagaatgaggacttgggcccagccagtcccttggacagcaccttctaccgctcactgctggaggacgatgacatgggggacctggtggatgctgaggagtatctggtaccccagcagggcttcttctgtccagaccctgccccgggcgctgggggcatggtccaccacaggcaccgcagctcatctaccaggagtggcggtggggacctgacactagggctggagccctctgaagaggaggcccccaggtctccactggcaccctccgaaggggctggctccgatgtatttgatggtgacctgggaatgggggcagccaaggggctgcaaagcctccccacacatgaccccagccctctacagcggtacagtgaggaccccacagtacccctgccctctgagactgatggctacgttgcccccctgacctgcagcccccagcctgaatatgtgaaccagccagatgttcggccccagcccccttcgccccgagagggccctctgcctgctgcccgacctgctggtgccactctggaaaggcccaagactctctccccagggaagaatggggtcgtcaaagacgtttttgcctttgggggtgccgtggagaaccccgagtacttgacaccccagggaggagctgcccctcagccccaccctcctcctgccttcagcccagccttcgacaacctctattactgggaccaggacccaccagagcggggggctccacccagcaccttcaaagggacacctacggcagagaacccagagtacctgggtctggacgtgccagtgtgaaccagaaggccaagtccgcagaagccctgatgtgtcctcagggagcagggaaggcctgacttctgctggcatcaagaggtgggagggccctccgaccacttccaggggaacctgccatgccaggaacctgtcctaaggaaccttccttcctgcttgagttcccagatggctggaaggggtccagcctcgttggaagaggaacagcactggggagtctttgtggattctgaggccctgcccaatgagactctagggtccagtggatgccacagcccagcttggccctttccttccagatcctgggtactgaaagccttagggaagctggcctgagaggggaagcggccctaagggagtgtctaagaacaaaagcgacccattcagagactgtccctgaaacctagtactgccccccatgaggaaggaacagcaatggtgtcagtatccaggctttgtacagagtgcttttctgtttagtttttactttttttgttttgtttttttaaagatgaaataaagacccagggggagaatgggtgttgtatggggaggcaagtgtggggggtccttctccacacccactttgtccatttgcaaatatattttggaaaacagcta

SEQ ID NO: 51 - DNA, 69 bp, Homo sapiens
gagtgtctttctttgcaggtttctgtagccggaagatctccgttccgctcccagcggctccagtgtaaa

SEQ ID NO: 52 - DNA, 70 bp, Homo sapiens
aagagaccatctgcccgagtagccgcaaatgtgcttcatctaagcctctggggtgaacatattctagccc

SEQ ID NO: 53 - DNA, 69 bp, Homo sapiens
accgaagaaactgtggctacccgggcatcagccccgaggaatgcgcctctcggaagtgctgcttctcca

SEQ ID NO: 54 - DNA, 69 bp, Homo sapiens
acacagccgagcagcatttccgttgaaggacttgcatccccattgcgggcagtgctggacgtgtcccgg

SEQ ID NO: 55 - DNA, 70 bp, Homo sapiens
acaaacgggctcatcataatgcactggaacgaaaacgtagggaccacatcaaagacagctttcacagttt

SEQ ID NO: 56 - DNA, 69 bp, Homo sapiens
tccagcccatccagcaatcgccccctttctgccctgggggcccaggatgtagatattgtacaaaggttt

SEQ ID NO: 57 - DNA, 70 bp, Homo sapiens
ggtatggctgcagtcctccggttgcatactggactcttcaaaaactgttttgggtagctgccacttgaac

SEQ ID NO: 58 - DNA, 69 bp, Homo sapiens
ccggagtcaccccgatgattactcttttcagacacagcggtttttgtttccaagaagccaaaattgttt

SEQ ID NO: 59 - DNA, 69 bp, Homo sapiens
tctccacaatgcaagctacagagctggggaagttgccggctggaggagttctctaccctccaccttcct

SEQ ID NO: 60 - DNA, 69 bp, Homo sapiens
gctgggcttcattagtgaggctgaccagagccggttgacttctctgctagaagagaccttgaacaagtt

SEQ ID NO: 61 - DNA, 69 bp, Homo sapiens
ggcgacaggaacgtgtctaggcgaacgactaaagcacctggaaaggctgatccggagttcaagggaaga

SEQ ID NO: 62 - DNA, 69 bp, Homo sapiens
cattcgggccatttccgtggtttctcatgagctgtgttcacagacctcagcagggcatcgcatggaccg

SEQ ID NO: 63 - DNA, 69 bp, Homo sapiens
agatagtgctctgtgcctaaggtgaagccacactagggtgaagcctcacttccctgtttgagcaatgca

SEQ ID NO: 64 - DNA, 70 bp, Homo sapiens
tggggagggatggcccagcctgtaagatactgtatatgcgctgctgtagataccggaatgaattttctgt

SEQ ID NO: 65 - DNA, 69 bp, Homo sapiens
tcacattcaggcccctgttcttcaagctgtttgattgggctaaaacagaagatgccccaaaggacaggt

SEQ ID NO: 66 - DNA, 69 bp, Homo sapiens
attatgattactatatccgaggagcaacaaccactttctctgcagtggaaagggatcgccagtggaagt

SEQ ID NO: 67 - DNA, 69 bp, Homo sapiens
caccaggagtaccgttagctttccccttcttctggcccatttgactcatcagcacaatagggtcaccac

SEQ ID NO: 68 - DNA, 69 bp, Homo sapiens
acccccagcacagggggattctgagcagtgcctcttgtctgagggacatatcagtgacctcgacgttgc

SEQ ID NO: 69 - DNA, 69 bp, Homo sapiens
tctgtgatgtaggagtctctctaccactggatgaaaatatgactgtgactgaccctgaggcttgttaca

SEQ ID NO: 70 - DNA, 69 bp, Homo sapiens
ctccacagcggttcttcacaggatcccagcaatgaactgttctagggaaagtggcttcctgcccaaact

SEQ ID NO: 71 - DNA, 69 bp, Homo sapiens
atgggaaggaagggacccttacccccggctcttctcctgacctgccaataaaaatttatggtccaaggg

SEQ ID NO: 72 - DNA, 69 bp, Homo sapiens
cttggcaactgctagagcagggaggggggagggcaggggattacctaattagagtgggttagcttagat

SEQ ID NO: 73 - DNA, 69 bp, Homo sapiens
gtcctcattccctgcccttcctttggttgccatatggaatggccatggaatgcacgaagtcacaatgca

SEQ ID NO: 74 - DNA, 69 bp, Homo sapiens
tctcttgagactcgttactgggcatcagtagaagaatatattcccaaatgggaacagtttcttttagga

SEQ ID NO: 75 - DNA, 69 bp, Homo sapiens
tggtatccagaatggaattttgctacatggggtctgggtgggggcaaagagacccagtcaattacatgt

SEQ ID NO: 76 - DNA, 69 bp, Homo sapiens
ctattctggaggcaccaaggaactagcagagatgatgaatgcatcatcaagcacgaccacattgtttcc

SEQ ID NO: 77 - DNA, 69 bp, Homo sapiens
tcaggtgggccttgagttatattttaactcagctgctcagttcccagggcacatttctggatcagaacc

SEQ ID NO: 78 - DNA, 70 bp, Homo sapiens
gggagatacagccatccaccttcagatgtgtctacgtgcgctctgccattcaactcggaaactataagta

SEQ ID NO: 79 - DNA, 69 bp, Homo sapiens
aattaaagttatagacaagatgggagggccagaagagtttatccagagattcctccctcgggagctcca

SEQ ID NO: 80 - DNA, 70 bp, Homo sapiens
cagctttgctttgcaaagattgatgacagactggttcctcagaggcctaggctacccgtcaccccttttt

SEQ ID NO: 81 - DNA, 70 bp, Homo sapiens
cctcctggggagtgtcatttttgtctacagcttcattgacttccacgtgttccaccgcaaagatagccgc

SEQ ID NO: 82 - DNA, 60 bp, Homo sapiens
gaaggaggggctgggccagggccagtcgctggaacagctggaagctctggtgcaaaccaa

SEQ ID NO: 83 - DNA, 69 bp, Homo sapiens
ggtgggggaacactgagaaagaggcagggacctaaagggactacctctgtgccttgccacattaaattg

SEQ ID NO: 84 - DNA, 69 bp, Homo sapiens
ggcaagatctatcggcagggaaacctgtttgacttcttacgcttgacggaatggcgtggcccccgcgtg

SEQ ID NO: 85 - DNA, 69 bp, Homo sapiens
aggctaggtgggttgaaagccaaggagtcactgagaccaaggctttctctactgattccgcagctcaga

SEQ ID NO: 86 - DNA, 69 bp, Homo sapiens
tgactagcgagggacctccgctgcatctcagcaaagcccctcccagggtttgatcgattgagcaggaca

SEQ ID NO: 87 - DNA, 69 bp, Homo sapiens
tcctctgtcatactgtatctggaatgctttgtaatacttgcatgcttcttagaccagaacatgtaggtc

SEQ ID NO: 88 - DNA, 69 bp, Homo sapiens
agctcctcggagggaacagagcggctgtgtatgcagcctgcaggtttccatacactgaagcttttacct

SEQ ID NO: 89 - DNA, 69 bp, Homo sapiens
gtaggctgagggctgcacctcccacggtggtcaccatgccaatgaaggaagttcagtcttgtctttgat

SEQ ID NO: 90 - DNA, 70 bp, Homo sapiens
acctcgaggcacttacttgcaagtcaggggcaagagacaataattaaaaccaaagtcagaatcccagcac

SEQ ID NO: 91 - DNA, 69 bp, Homo sapiens
attcctgccaccactgggcaaacagaagaatttttctgtctttggagagtattttagaaactccaatga

SEQ ID NO: 92 - DNA, 70 bp, Homo sapiens
gagaaccagaagacgatgaggctcctgcaaaagctcagtactacacagtgacagatgagcatcacagatc

SEQ ID NO: 93 - DNA, 69 bp, Homo sapiens
ttctcccaggatggtgaagggggacctggtacccagtgatccccaccccaggatcctaaatcatgactt

SEQ ID NO: 94 - DNA, 70 bp, Homo sapiens
cagtgtttcaaatgccgtgaaacatggcatcatgctctaacttcagtataccaataaaacaatcagcttg

SEQ ID NO: 95 - DNA, 69 bp, Homo sapiens
tcgattcagtcataggcgaatctgttctgcccgaggcttgtggtcaagcaaaaattcagccctgaaatc

SEQ ID NO: 96 - DNA, 69 bp, Homo sapiens
tgcaattacgtccaccaaagacccgtgttgggggtactgaaggagaggccctgggggaccctctgaagc

SEQ ID NO: 97 - DNA, 71 bp, Homo sapiens
gggaaaacttgctgcggttgctcaaggtgaggaataaaatgcttcccgttcttctggatgggcatcctatc

SEQ ID NO: 98 - DNA, 69 bp, Homo sapiens
atataaaagatacacaccaatatcttcttcaggctctgacaggcctcctggaaacttccacatattttt

SEQ ID NO: 99 - DNA, 70 bp, Homo sapiens
agctcagggcagtggatagcgagtaccccaagaacatcaaagtctgggaagggatccctgagtctcccag

SEQ ID NO: 100 - DNA, 69 bp, Homo sapiens
gactgtccctgaaacctagtactgccccccatgaggaaggaacagcaatggtgtcagtatccaggcttt

SEQ ID NO: 101 - protein, 306 aa, Homo sapiens
MAAAAAAAAAAGAAGGRGSGPGRRRHLVPGAGGEAGEGAPGGAGDYGNGLESEELEPEELLLEPEPEPEPEEEPPRPRAPPGAPGPGPGSGAPGSQEEEEEPGLVEGDPGDGAIEDPELEAIKARVREMEEEAEKLKELQNEVEKQMNMSPPPGNAGPVIMSIEEKMEADARSIYVGNVDYGATAEELEAHFHGCGSVNRVTILCDKFSGHPKGFAYIEFSDKESVRTSLALDESLFRGRQIKVIPKRTNRPGISTTDRGFPRARYRARTTNYNSSRSRFYSGFNSRPRGRVYRGRARATSWYSPY

SEQ ID NO: 102 - protein, 581 aa, Homo sapiens
MAVRQALGRGLQLGRALLLRFTGKPGRAYGLGRPGPAAGCVRGERPGWAAGPGAEPRRVGLGLPNRLRFFRQSVAGLAARLQRQFVVRAWGCAGPCGRAVFLAFGLGLGLIEEKQAESRRAVSACQEIQAIFTQKSKPGPDPLDTRRLQGFRLEEYLIGQSIGKGCSAAVYEATMPTLPQNLEVTKSTGLLPGRGPGTSAPGEGQERAPGAPAFPLAIKMMWNISAGSSSEAILNTMSQELVPASRVALAGEYGAVTYRKSKRGPKQLAPHPNIIRVLRAFTSSVPLLPGALVDYPDVLPSRLHPEGLGHGRTLFLVMKNYPCTLRQYLCVNTPSPRLAAMMLLQLLEGVDHLVQQGIAHRDLKSDNILVELDPDGCPWLVIADFGCCLADESIGLQLPFSSWYVDRGGNGCLMAPEVSTARPGPRAVIDYSKADAWAVGAIAYEIFGLVNPFYGQGKAHLESRSYQEAQLPALPESVPPDVRQLVRALLQREASKRPSARVAANVLHLSLWGEHILALKNLKLDKMVGWLLQQSAATLLANRLTEKCCVETKMKMLFLANLECETLCQAALLLCSWRAAL

SEQ ID NO: 103 - protein, 129 aa, Homo sapiens
MGRRDAQLLAALLVLGLCALAGSEKPSPCQCSRLSPHNRTNCGFPGITSDQCFDNGCCFDSSVTGVPWCFHPLPKQESDQCVMEVSDRRNCGYPGISPEECASRKCCFSNFIFEVPWCFFPKSVEDCHY

SEQ ID NO: 104 - protein, 814 aa, Homo sapiens
MQDAENVAVPEAAEERAEPGQQQPAAEPPPAEGLLRPAGPGAPEAAGTEASSEEVGIAEAGPESEVRTEPAAEAEAASGPSESPSPPAAEELPGSHAEPPVPAQGEAPGEQARDERSDSRAQAVSEDAGGNEGRAAEAEPRALENGDADEPSFSDPEDFVDDVSEEELLGDVLKDRPQEADGIDSVIVVDNVPQVGPDRLEKLKNVIHKIFSKFGKITNDFYPEEDGKTKGYIFLEYASPAHAVDAVKNADGYKLDKQHTFRVNLFTDFDKYMTISDEWDIPEKQPFKDLGNLRYWLEEAECRDQYSVIFESGDRTSIFWNDVKDPVSIEERARWTETYVRWSPKGTYLATFHQRGIALWGGEKFKQIQRFSHQGVQLIDFSPCERYLVTFSPLMDTQDDPQAIIIWDILTGHKKRGFHCESSAHWPIFKWSHDGKFFARMTLDTLSIYETPSMGLLDKKSLKISGIKDFSWSPGGNIIAFWVPEDKDIPARVTLMQLPTRQEIRVRNLFNVVDCKLHWQKNGDYLCVKVDRTPKGTQGVVTNFEIFRMREKQVPVDVVEMKETIIAFAWEPNGSKFAVLHGEAPRISVSFYHVKNNGKIELIKMFDKQQANTIFWSPQGQFVVLAGLRSMNGALAFVDTSDCTVMNIAEHYMASDVEWDPTGRYVVTSVSWWSHKVDNAYWLWTFQGRLLQKNNKDRFCQLLWRPRPPTLLSQEQIKQIKKDLKKYSKIFEQKDRLSQSKASKELVERRRTMMEDFRKYRKMAQELYMEQKNERLELRGGVDTDELDSNVDDWEEETIEFFVTEEIIPLGNQE

SEQ ID NO: 105 - protein, 160 aa, Homo sapiens
MSDNDDIEVESDEEQPRFQSAADKRAHHNALERKRRDHIKDSFHSLRDSVPSLQGEKASRAQILDKATEYIQYMRRKNHTHQQDIDDLKRQNALLEQQVRALEKARSSAQLQTNYPSSDNSLYTNAKGSTISAFDGGSDSSSESEPEEPQSRKKLRMEAS

SEQ ID NO: 106 - protein, 2715 aa, Homo sapiens
MAAAAGGGSCPGPGSARGRFPGRPRGAGGGGGRGGRGNGAERVRVALRRGGGATGPGGAEPGEDTALLRLLGLRRGLRRLRRLWAGPRVQRGRGRGRGRGWGPSRGCVPEEESSDGESDEEEFQGFHSDEDVAPSSLRSALRSQRGRAPRGRGRKHKTTPLPPPRLADVAPTPPKTPARKRGEEGTERMVQALTELLRRAQAPQAPRSRACEPSTPRRSRGRPPGRPAGPCRRKQQAVVVAEAAVTIPKPEPPPPVVPVKHQTGSWKCKEGPGPGPGTPRRGGQSSRGGRGGRGRGRGGGLPFVIKFVSRAKKVKMGQLSLGLESGQGQGQHEESWQDVPQRRVGSGQGGSPCWKKQEQKLDDEEEEKKEEEEKDKEGEEKEERAVAEEMMPAAEKEEAKLPPPPLTPPAPSPPPPLPPPSTSPPPPLCPPPPPPVSPPPLPSPPPPPAQEEQEESPPPVVPATCSRKRGRPPLTPSQRAEREAARAGPEGTSPPTPTPSTATGGPPEDSPTVAPKSTTFLKNIRQFIMPVVSARSSRVIKTPRRFMDEDPPKPPKVEVSPVLRPPITTSPPVPQEPAPVPSPPRAPTPPSTPVPLPEKRRSILREPTFRWTSLTRELPPPPPAPPPPPAPSPPPAPATSSRRPLLLRAPQFTPSEAHLKIYESVLTPPPLGAPEAPEPEPPPADDSPAEPEPRAVGRTNHLSLPRFAPVVTTPVKAEVSPHGAPALSNGPQTQAQLLQPLQALQTQLLPQALPPPQPQLQPPPSPQQMPPLEKARIAGVGSLPLSGVEEKMFSLLKRAKVQLFKIDQQQQQKVAASMPLSPGGQMEEVAGAVKQISDRGPVRSEDESVEAKRERPSGPESPVQGPRIKHVCRHAAVALGQARAMVPEDVPRLSALPLRDRQDLATEDTSSASETESVPSRSRRGKVEAAGPGGESEPTGSGGTLAHTPRRSLPSHHGKKMRMARCGHCRGCLRVQDCGSCVNCLDKPKFGGPNTKKQCCVYRKCDKIEARKMERLAKKGRTIVKTLLPWDSDESPEASPGPPGPRRGAGAGGPREEVVAHPGPEEQDSLLQRKSARRCVKQRPSYDIFEDSDDSEPGGPPAPRRRTPRENELPLPEPEEQSRPRKPTLQPVLQLKARRRLDKDALAPGPFASFPNGWTGKQKSPDGVHRVRVDFKEDCDLENVWLMGGLSVLTSVPGGPPMVCLLCASKGLHELVFCQVCCDPFHPFCLEEAERPLPQHHDTWCCRRCKFCHVCGRKGRGSKHLLECERCRHAYHPACLGPSYPTRATRKRRHWICSACVRCKSCGATPGKNWDVEWSGDYSLCPRCTQLYEKGNYCPICTRCYEDNDYESKMMQCAQCDHWVHAKCEGLSDEDYEILSGLPDSVLYTCGPCAGAAQPRWREALSGALQGGLRQVLQGLLSSKVVGPLLLCTQCGPDGKQLHPGPCGLQAVSQRFEDGHYKSVHSFMEDMVGILMRHSEEGETPDRRAGGQMKGLLLKLLESAFGWFDAHDPKYWRRSTRLPNGVLPNAVLPPSLDHVYAQWRQQEPETPESGQPPGDPSAAFQGKDPAAFSHLEDPRQCALCLKYGDADSKEAGRLLYIGQNEWTHVNCAIWSAEVFEENDGSLKNVHAAVARGRQMRCELCLKPGATVGCCLSSCLSNFHFMCARASYCIFQDDKKVFCQKHTDLLDGKEIVNPDGFDVLRRVYVDFEGINFKRKFLTGLEPDAINVLIGSIRIDSLGTLSDLSDCEGRLFPIGYQCSRLYWSTVDARRRCWYRCRILEYRPWGPREEPAHLEAAEENQTIVHSPAPSSEPPGGEDPPLDTDVLVPGAPERHSPIQNLDPPLRPDSGSAPPPAPRSFSGARIKVPNYSPSRRPLGGVSFGPLPSPGSPSSLTHHIPTVGDPDFPAPPRRSRRPSPLAPRPPPSRWASPPLKTSPQLRVPPPTSVVTALTPTSGELAPPGPAPSPPPPEDLGPDFEDMEVVSGLSAADLDFAASLLGTEPFQEEIVAAGAMGSSHGGPGDSSEEESSPTSRYIHFPVTVVSAPGLAPSATPGAPRIEQLDGVDDGTDSEAEAVQQPRGQGTPPSGPGVVRAGVLGAAGDRARPPEDLPSEIVDFVLKNLGGPGDGGAGPREESLPPAPPLANGSQPSQGLTASPADPTRTFAWLPGAPGVRVLSLGPAPEPPKPATSKIILVNKLGQVFVKMAGEGEPVPPPVKQPPLPPTISPTAPTSWTLPPGPLLGVLPVVGVVRPAPPPPPPPLTLVLSSGPASPPRQAIRVKRVSTFSGRSPPAPPPYKAPRLDEDGEASEDTPQVPGLGSGGFSRVRMKTPTVRGVLDLDRPGEPAGEESPGPLQERSPLLPLPEDGPPQVPDGPPDLLLESQWHHYSGEASSSEEEPPSPDDKENQAPKRTGPHLRFEISSEDGFSVEAESLEGAWRTLIEKVQEARGHARLRHLSFSGMSGARLLGIHHDAVIFLAEQLPGAQRCQHYKFRYHQQGEGQEEPPLNPHGAARAEVYLRKCTFDMFNFLASQHRVLPEGATCDEEEDEVQLRSTRRATSLELPMAMRFRHLKKTSKEAVGVYRSAIHGRGLFCKRNIDAGEMVIEYSGIVIRSVLTDKREKFYDGKGIGCYMFRMDDFDVVDATMHGNAARFINHSCEPNCFSRVIHVEGQKHIVIFALRRILRGEELTYDYKFPIEDASNKLPCNCGAKRCRRFLN

SEQ ID NO: 107 - protein, 605 aa, Homo sapiens
MQCCGLVHRRRVRVSYGSADSYTSRPSDSDVSLEEDREAVRREAERQAQAQLEKAKTKPVAFAVRTNVSYSAAHEDDVPVPGMAISFEAKDFLHVKEKFNNDWWIGRLVKEGCEIGFIPSPVKLENMRLQHEQRAKQGKFYSSKSGGNSSSSLGDIVPSSRKSTPPSSAIDIDATGLDAEENDIPANHRSPKPSANSVTSPHSKEKRMPFFKKTEHTPPYDVVPSMRPVVLVGPSLKGYEVTDMMQKALFDFLKHRFEGRISITRVTADISLAKRSVLNNPSKHAIIERSNTRSSLAEVQSEIERIFELARTLQLVVLDADTINHPAQLSKTSLAPIIVYVKISSPKVLQRLIKSRGKSQAKHLNVQMVAADKLAQCPPELFDVILDENQLEDACEHLADYLEAYWKATHPPSSSLPNPLLSRTLATSSLPLSPTLASNSQGSQGDQRTDRSAPIRSASQAEEEPSVEPVKKSQHRSSSSAPHHNHRSGTSRGLSRQETFDSETQESRDSAYVEPKEDYSHDHVDHYASHRDHNHRDETHGSSDHRHRESRHRSRDVDREQDHNECNKQRSRHKSKDRYCEKDGEVISKKRNEAGEWNRDVYIPQ

SEQ ID NO: 108 - protein, 562 aa, Homo sapiens
MSRVHGMHPKETTRQLSLAVKDGLIVETLTVGCKGSKAGIEQEGYWLPGDEIDWETENHDWYCFECHLPGEVLICDLCFRVYHSKCLSDEFRLRDSSSPWQCPVCRSIKKKNTNKQEMGTYLRFIVSRMKERAIDLNKKGKDNKHPMYRRLVHSAVDVPTIQEKVNEGKYRSYEEFKADAQLLLHNTVIFYGADSEQADIARMLYKDTCHELDELQLCKNCFYLSNARPDNWFCYPCIPNHELVWAKMKGFGFWPAKVMQKEDNQVDVRFFGHHHQRAWIPSENIQDITVNIHRLHVKRSMGWKKACDELELHQRFLREGRFWKSKNEDRGEEEAESSISSTSNEQLKVTQEPRAKKGRRNQSVEPKKEEPEPETEAVSSSQEIPTMPQPIEKVSVSTQTKKLSASSPRMLHRSTQTTNDGVCQSMCHDKYTKIFNDFKDRMKSDHKRETERVVREALEKLRSEMEEEKRQAVNKAVANMQGEMDRKCKQVKEKCKEEFVEEIKKLATQHKQLISQTKKKQWCYNCEEEAMYHCCWNTSYCSIKCQQEHWHAEHKRTCRRKR

SEQ ID NO: 109 - protein, 2145 aa, Homo sapiens
MSDRSGPTAKGKDGKKYSSLNLFDTYKGKSLEIQKPAVAPRHGLQSLGKVAIARRMPPPANLPSLKAENKGNDPNVSLVPKDGTGWASKQEQSDPKSSDASTAQPPESQPLPASQTPASNQPKRPPAAPENTPLVPSGVKSWAQASVTHGAHGDGGRASSLLSRFSREEFPTLQAAGDQDKAAKERESAEQSSGPGPSLRPQNSTTWRDGGGRGPDELEGPDSKLHHGHDPRGGLQPSGPPQFPPYRGMMPPFMYPPYLPFPPPYGPQGPYRYPTPDGPSRFPRVAGPRGSGPPMRLVEPVGRPSILKEDNLKEFDQLDQENDDGWAGAHEEVDYTEKLKFSDEEDGRDSDEEGAEGHRDSQSASGEERPPEADGKKGNSPNSEPPTPKTAWAETSRPPETEPGPPAPKPPLPPGDYPDRGGPPCKPPAPEDEDEAWRQRRKQSSSEISLAVERARRRREEEERRMQEERRAACAEKLKRLDEKFGAPDKRLKAEPAAPPAAPSTPAPPPAVPKELPAPPAPPPASAPTPEKEPEEPAQAPPAQSTPTPGVAAAPTLVSGGGSTSSTSSGSFEASPVEPQLPSKEGPEPPEEVPPPTTPPVPKVEPKGDGIGPTRQPPSQGLGYPKYQKSLPPRFQRQQQEQLLKQQQQHQWQQHQQGSAPPTPVPPSPPQPVTLGAVPAPQAPPPPPKALYPGALGRPPPMPPMNFDPRWMMIPPYVDPRLLQGRPPLDFYPPGVHPSGLVPRERSDSGGSSSEPFDRHAPAMLRERGTPPVDPKLAWVGDVFTATPAEPRPLTSPLRQAADEDDKGMRSETPPVPPPPPYLASYPGFPENGAPGPPISRFPLEEPGPRPLPWPPGSDEVAKIQTPPPKKEPPKEETAQLTGPEAGRKPARGVGSGGQGPPPPRRESRTETRWGPRPGSSRRGIPPEEPGAPPRRAGPIKKPPPPTKVEELPPKPLEQGDETPKPPKPDPLKITKGKLGGPKETPPNGNLSPAPRLRRDYSYERVGPTSCRGRGRGEYFARGRGFRGTYGGRGRGARSREFRSYREFRGDDGRGGGTGGPNHPPAPRGRTASETRSEGSEYEEIPKRRRQRGSETGSETHESDLAPSDKEAPTPKEGTLTQVPLAPPPPGAPPSPAPARFTARGGRVFTPRGVPSRRGRGGGRPPPQVCPGWSPPAKSLAPKKPPTGPLPPSKEPLKEKLIPGPLSPVARGGSNGGSNVGMEDGERPRRRRHGRAQQQDKPPRFRRLKQERENAARGSEGKPSLTLPASAPAPEEALTTVTVAPAPRRAAAKSPDLSNQNSDQANEEWETASESSDFTSERRGDKEAPPPVLLTPKAVGTPGGGGGGAVPGISAMSRGDLSQRAKDLSKRSFSSQRPGMERQNRRPGPGGKAGSSGSSSGGGGGGPGGRTGPGRGDKRSWPSPKNRSRPPEERPPGLPLPPPPPSSSAVFRLDQVIHSNPAGIQQALAQLSSRQGSVTAPGGHPRHKPGPPQAPQGPSPRPPTRYEPQRVNSGLSSDPHFEEPGPMVRGVGGTPRDSAGVSPFPPKRRERPPRKPELLQEESLPPPHSSGFLGSKPEGPGPQAESRDTGTEALTPHIWNRLHTATSRKSYRPSSMEPWMEPLSPFEDVAGTEMSQSDSGVDLSGDSQVSSGPCSQRSSPDGGLKGAAEGPPKRPGGSSPLNAVPCEGPPGSEPPRRPPPAPHDGDRKELPREQPLPPGPIGTERSQHTDRGTEPGPIRPSHRPGPPVQFGTSDKDSDLRLVVGDSLKAEKELTASVTEAIPVSRDWELLPSAAASAEPQSKNLDSGHCVPEPSSSGQRLYPEVFYGSAGPSSSQISGGAMDSQLHPNSGGFRPGTPSLHPYRSQPLYLPPGPAPPSALLSGVALKGQFLDFSTMQATELGKLPAGGVLYPPPSFLYSPAFCPSPLPDTSLLQVRQDLPSPSDFYSTPLQPGGQSGFLPSGAPAQQMLLPMVDSQLPVVNFGSLPPAPPPAPPPLSLLPVGPALQPPSLAVRPPPAPATRVLPSPARPFPASLGRAELHPVELKPFQDYQKLSSNLGGPGSSRTPPTGRSFSGLNSRLKATPSTYSGVFRTQRVDLYQQASPPDALRWIPKPWERTGLPPREGPSRRAEEPGSRGDKEPGLPPPR

SEQ ID NO: 110 - protein, 535 aa, Homo sapiens
MSEGESQTVLSSGSDPKVESSSSAPGLTSVSPPVTSTTSAASPEEEEESEDESEILEESPCGRWQKRREEVNQRNVPGIDSAYLAMDTEEGVEVVWNEVQFSERKNYKLQEEKVRAVFDNLIQLEHLNIVKFHKYWADIKENKARVIFITEYMSSGSLKQFLKKTKKNHKTMNEKAWKRWCTQILSALSYLHSCDPPIIHGNLTCDTIFIQHNGLIKIGSVAPDTINNHVKTCREEQKNLHFFAPEYGEVTNVTTAVDIYSFGMCALEMAVLEIQGNGESSYVPQEAISSAIQLLEDPLQREFIQKCLQSEPARRPTARELLFHPALFEVPSLKLLAAHCIVGHQHMIPENALEEITKNMDTSAVLAEIPAGPGREPVQTLYSQSPALELDKFLEDVRNGIYPLTAFGLPRPQQPQQEEVTSPVVPPSVKTPTPEPAEVETRKVVLMQCNIESVEEGVKHHLTLLLKLEDKLNRHLSCDLMPNENIPELAAELVQLGFISEADQSRLTSLLEETLNKFNFARNSTLNSAAVTVSS

SEQ ID NO: 111 - protein, 1980 aa, Homo sapiens
MNPTNPFSGQQPSAFSASSSNVGTLPSKPPFRFGQPSLFGQNSTLSGKSSGFSQVSSFPASSGVSHSSSVQTLGFTQTSSVGPFSGLEHTSTFVATSGPSSSSVLGNTGFSFKSPTSVGAFPSTSAFGQEAGEIVNSGFGKTEFSFKPLENAVFKPILGAESEPEKTQSQIASGFFTFSHPISSAPGGLAPFSFPQVTSSSATTSNFTFSKPVSSNNSLSAFTPALSNQNVEEEKRGPKSIFGSSNNSFSSFPVSSAVLGEPFQASKAGVRQGCEEAVSQVEPLPSLMKGLKRKEDQDRSPRRHGHEPAEDSDPLSRGDHPPDKRPVRLNRPRGGTLFGRTIQDVFKSNKEVGRLGNKEAKKETGFVESAESDHMAIPGGNQSVLAPSRIPGVNKEEETESREKKEDSLRGTPARQSNRSESTDSLGGLSPSEVTAIQCKNIPDYLNDRTILENHFGKIAKVQRIFTRRSKKLAVVHFFDHASAALARKKGKSLHKDMAIFWHRKKISPNKKPFSLKEKKPGDGEVSPSTEDAPFQHSPLGKAAGRTGASSLLNKSSPVKKPSLLKAHQFEGDSFDSASEGSEGLGPCVLSLSTLIGTVAETSKEKYRLLDQRDRIMRQARVKRTDLDKARTFVGTCLDMCPEKERYMRETRSQLSVFEVVPGTDQVDHAAAVKEYSRSSADQEEPLPHELRPLPVLSRTMDYLVTQIMDQKEGSLRDWYDFVWNRTRGIRKDITQQHLCDPLTVSLIEKCTRFHIHCAHFMCEEPMSSFDAKINNENMTKCLQSLKEMYQDLRNKGVFCASEAEFQGYNVLLSLNKGDILREVQQFHPAVRNSSEVKFAVQAFAALNSNNFVRFFKLVQSASYLNACLLHCYFSQIRKDALRALNFAYTVSTQRSTIFPLDGVVRMLLFRDCEEATDFLTCHGLTVSDGCVELNRSAFLEPEGLSKTRKSVFITRKLTVSVGEIVNGGPLPPVPRHTPVCSFNSQNKYIGESLAAELPVSTQRPGSDTVGGGRGEECGVEPDAPLSSLPQSLPAPAPSPVPLPPVLALTPSVAPSLFQLSVQPEPPPPEPVPMYSDEDLAQVVDELIQEALQRDCEEVGSAGAAYAAAALGVSNAAMEDLLTAATTGILRHIAAEEVSKERERREQERQRAEEERLKQERELVLSELSQGLAVELMERVMMEFVRETCSQELKNAVETDQRVRVARCCEDVCAHLVDLFLVEEIFQTAKETLQELQCFCKYLQRWREAVTARKKLRRQMRAFPAAPCCVDVSDRLRALAPSAECPIAEENLARGLLDLGHAGRLGISCTRLRRLRNKTAHQMKVQHFYQQLLSDVAWASLDLPSLVAEHLPGRQEHVFWKLVLVLPDVEEQSPESCGRILANWLKVKFMGDEGSVDDTSSDAGGIQTLSLFNSLSSKGDQMISVNVCIKVAHGALSDGAIDAVETQKDLLGASGLMLLLPPKMKSEDMAEEDVYWLSALLQLKQLLQAKPFQPALPLVVLVPSPGGDAVEKEVEDGLMLQDLVSAKLISDYTVTEIPDTINDLQGSTKVLQAVQWLVSHCPHSLDLCCQTLIQYVEDGIGHEFSGRFFHDRRERRLGGLASQEPGAIIELFNSVLQFLASVVSSEQLCDLSWPVTEFAEAGGSRLLPHLHWNAPEHLAWLKQAVLGFQLPQMDLPPLGAPWLPVCSMVVQYASQIPSSRQTQPVLQSQVENLLHRTYCRWKSKSPSPVHGAGPSVMEIPWDDLIALCINHKLRDWTPPRLPVTSEALSEDGQICVYFFKNDLKKYDVPLSWEQARLQTQKELQLREGRLAIKPFHPSANNFPIPLLHMHRNWKRSTECAQEGRIPSTEDLMRGASAEELLAQCLSSSLLLEKEENKRFEDQLQQWLSEDSGAFTDLTSLPLYLPQTLVSLSHTIEPVMKTSVTTSPQSDMMREQLQLSEATGTCLGERLKHLERLIRSSREEEVASELHLSALLDMVDI

SEQ ID NO: 112 - protein, 1669 aa, Homo sapiens
MGPRLSVWLLLLPAALLLHEEHSRAAAKGGCAGSGCGKCDCHGVKGQKGERGLPGLQGVIGFPGMQGPEGPQGPPGQKGDTGEPGLPGTKGTRGPPGASGYPGNPGLPGIPGQDGPPGPPGIPGCNGTKGERGPLGPPGLPGFAGNPGPPGLPGMKGDPGEILGHVPGMLLKGERGFPGIPGTPGPPGLPGLQGPVGPPGFTGPPGPPGPPGPPGEKGQMGLSFQGPKGDKGDQGVSGPPGVPGQAQVQEKGDFATKGEKGQKGEPGFQGMPGVGEKGEPGKPGPRGKPGKDGDKGEKGSPGFPGEPGYPGLIGRQGPQGEKGEAGPPGPPGIVIGTGPLGEKGERGYPGTPGPRGEPGPKGFPGLPGQPGPPGLPVPGQAGAPGFPGERGEKGDRGFPGTSLPGPSGRDGLPGPPGSPGPPGQPGYTNGIVECQPGPPGDQGPPGIPGQPGFIGEIGEKGQKGESCLICDIDGYRGPPGPQGPPGEIGFPGQPGAKGDRGLPGRDGVAGVPGPQGTPGLIGQPGAKGEPGEFYFDLRLKGDKGDPGFPGQPGMPGRAGSPGRDGHPGLPGPKGSPGSVGLKGERGPPGGVGFPGSRGDTGPPGPPGYGPAGPIGDKGQAGFPGGPGSPGLPGPKGEPGKIVPLPGPPGAEGLPGSPGFPGPQGDRGFPGTPGRPGLPGEKGAVGQPGIGFPGPPGPKGVDGLPGDMGPPGTPGRPGFNGLPGNPGVQGQKGEPGVGLPGLKGLPGLPGIPGTPGEKGSIGVPGVPGEHGAIGPPGLQGIRGEPGPPGLPGSVGSPGVPGIGPPGARGPPGGQGPPGLSGPPGIKGEKGFPGFPGLDMPGPKGDKGAQGLPGITGQSGLPGLPGQQGAPGIPGFPGSKGEMGVMGTPGQPGSPGPVGAPGLPGEKGDHGFPGSSGPRGDPGLKGDKGDVGLPGKPGSMDKVDMGSMKGQKGDQGEKGQIGPIGEKGSRGDPGTPGVPGKDGQAGQPGQPGPKGDPGISGTPGAPGLPGPKGSVGGMGLPGTPGEKGVPGIPGPQGSPGLPGDKGAKGEKGQAGPPGIGIPGLRGEKGDQGIAGFPGSPGEKGEKGSIGIPGMPGSPGLKGSPGSVGYPGSPGLPGEKGDKGLPGLDGIPGVKGEAGLPGTPGPTGPAGQKGEPGSDGIPGSAGEKGEPGLPGRGFPGFPGAKGDKGSKGEVGFPGLAGSPGIPGSKGEQGFMGPPGPQGQPGLPGSPGHATEGPKGDRGPQGQPGLPGLPGPMGPPGLPGIDGVKGDKGNPGWPGAPGVPGPKGDPGFQGMPGIGGSPGITGSKGDMGPPGVPGFQGPKGLPGLQGIKGDQGDQGVPGAKGLPGPPGPPGPYDIIKGEPGLPGPEGPPGLKGLQGLPGPKGQQGVTGLVGIPGPPGIPGFDGAPGQKGEMGPAGPTGPRGFPGPPGPDGLPGSMGPPGTPSVDHGFLVTRHSQTIDDPQCPSGTKILYHGYSLLYVQGNERAHGQDLGTAGSCLRKFSTMPFLFCNINNVCNFASRNDYSYWLSTPEPMPMSMAPITGENIRPFISRCAVCEAPAMVMAVHSQTIQIPPCPSGWSSLWIGYSFVMHTSAGAEGSGQALASPGSCLEEFRSAPFIECHGRGTCNYYANAYSFWLATIERSEMFKKPTPSTLKAGELRTHVSRCQVCMRRT

SEQ ID NO: 113 - protein, 465 aa, Homo sapiens
MVSSQKLEKPIEMGSSEPLPIADGDRRRKKKRRGRATDSLPGKFEDMYKLTSELLGEGAYAKVQGAVSLQNGKEYAVKIIEKQAGHSRSRVFREVETLYQCQGNKNILELIEFFEDDTRFYLVFEKLQGGSILAHIQKQKHFNEREASRVVRDVAAALDFLHTKDKVSLCHLGWSAMAPSGLTAAPTSLGSSDPPTSASQVAGTTGIAHRDLKPENILCESPEKVSPVKICDFDLGSGMKLNNSCTPITTPELTTPCGSAEYMAPEVVEVFTDQATFYDKRCDLWSLGVVLYIMLSGYPPFVGHCGADCGWDRGEVCRVCQNKLFESIQEGKYEFPDKDWAHISSEAKDLISKLLVRDAKQRLSAAQVLQHPWVQGQAPEKGLPTPQVLQRNSSTMDLTLFAAEAIALNRQLSQHEENELAEEPEALADGLCSMKLSPPCKSRLARRRALAQAGRGEDRSPPTAL

SEQ ID NO: 114 - protein, 193 aa, Homo sapiens
MARARQEGSSPEPVEGLARDGPRPFPLGRLVPSAVSCGLCEPGLAAAPAAPTLLPAAYLCAPTAPPAVTAALGGSRWPGGPRSRPRGPRPDGPQPSLSLAEQHLESPVPSAPGALAGGPTQAAPGVRGEEEQWAREIGAQLRRMADDLNAQYERRRQEEQQRHRPSPWRVLYNLIMGLLPLPRGHRAPEMEPN

SEQ ID NO: 115 - protein, 897 aa, Homo sapiens
MEYTKQLILSCLLNICQKLSPDGGKIPKDILDEEKFNVELIVQCIRLSEMPQTHHHALLLLGTVAGIFPDKVLHNIMSIFTFMGANVMRLDDTYSFQVINKTVKMVIPALIQSDSGDSIEVSRNVEEIVVKIISVFVDALPHVPEHRRLPILVQLVDTLGAEKFLWILLILLFEQYVTKTVLAAAYGEKDAILEADTEFWFSVCCEFSVQHQIQSLMNILQYLLKLPEEKEETIPKAVSFNKSESQEEMLQVFNVETHTSKQLRHFKFLSVSFMSQLLSSNDFLKKVVESGGPEILKGLEERLLETVLGYISAVAQSMERNADKLTVKFWRALLSKAYDLLDKVNALLPTETFIPVIRGLVGNPLPSVRRKALDLLNNKLQQNISWKKTIVTRFLKLVPDLLAIVQRKKKEGEEEQAINRQTALYTLKLLCKNFGAENPDPFVPVLSTAVKLIAPERKEEKNVLGSALLCIAEVTSTLEALAIPQLPSLMPSLLTTMKNTSELVSSEVYLLSALAALQKVVETLPHFISPYLEGILSQVIHLEKITSEMGSASRANIRLTSLKKTLATTLAPRVLLPAIKKTYKQIEKNWKNHMGPFMSILQEHIGAMKKEELTSHQSQLTAFFLEALDFRAQHSENDLEEVGKTENCIIDCLVAMVVKLSEVTFRPLFFKLFDWAKTEDAPKDRLLTFYNLADCIAEKLKGLFTLFAGHLVKPFADTLDQVNISKTDEAFFDSENDPEKCCLLLQFILNCLYKIFLFDTQHFISKERAGALMMPLVDQLVNRLGGEEKFQERVTKHLIPCIAQFSVAMADDSLWKPLNYQILLKTRDSSPKVRFAALITVLALAEKLKENYIVLLPESIPFLAELMEDECEEVEHQCQKTIQQLETVLGEPLQSYF

SEQ ID NO: 116 - protein, 201 aa, Homo sapiens
MDLSLLWVLLPLVTMAWGQYGDYGYPYQQYHDYSDDGWVNLNRQGFSYQCPQGQVIVAVRSIFSKKEGSDRQWNYACMPTPQSLGEPTECWWEEINRAGMEWYQTCSNNGLVAGFQSRYFESVLDREWQFYCCRYSKRCPYSCWLTTEYPGHYGEEMDMISYNYDYYIRGATTTFSAVERDRQWKFIMCRMTEYDCEFANV

SEQ ID NO: 117 - protein, 265 aa, Homo sapiens
MPMRHRKKAADKNLPCRPLVCAVLDLMVEFIVTHMMKEFPMDLYIRCIQVVHKLLCYQKKCRVRLHYTWRELWSALINLLKFLMSNETVLLAKHNIFTLALMIVNLFNMFITYGDTFLPTPSSYDELYYEIIRMHQSFDNLYSMVLRLSTNAGQWKEAASKVTHALVNIRAIINHFNPKIESYAAVNHISQLSEEQVLEVVRANYDTLTLKLQDGLDQYERYSEQHKEAAFFKELVRSISTNVRRNLVFHTLSQEVLLKEFSTIS

SEQ ID NO: 118 - protein, 278 aa, Homo sapiens
MKLFQRSTPAITLESPDIKYPLRLIDREIISHDTRRFRFALPSPQHILGLPVGQHIYLSARIDGNLVVRPYTPISSDDDKGFVDLVIKVYFKDTHPKFPAGGKMSQYLESMQIGDTIEFRGPSGLLVYQGKGKFAIRPDKKSNPIIRTVKSVGMIAGGTGITPMLQVIRAIMKDPDDHTVCHLLFANQTEKDILLRPELEELRNKHSARFKLWYTLDRAPEAWDYGQGFVNEEMIRDHLPPPEEEPLVLMCGPPPMIQYACLPNLDHVGHPTERCFVF

SEQ ID NO: 119 - protein, 322 aa, Homo sapiens
MEGISNFKTPSKLSEKKKSVLCSTPTINIPASPFMQKLGFGTGVNVYLMKRSPRGLSHSPWAVKKINPICNDHYRSVYQKRLMDEAKILKSLHHPNIVGYRAFTEANDGSLCLAMEYGGEKSLNDLIEERYKASQDPFPAAIILKVALNMARGLKYLHQEKKLLHGDIKSSNVVIKGDFETIKICDVGVSLPLDENMTVTDPEACYIGTEPWKPKEAVEENGVITDKADIFAFGLTLWEMMTLSIPHINLSNDDDDEDKTFDESDFDDEAYYAALGTRPPINMEELDESYQKVIELFSVCTNEDPKDRPSAAHIVEALETDV

SEQ ID NO: 120 - protein, 878 aa, Homo sapiens
MATAPSYPAGLPGSPGPGSPPPPGGLELQSPPPLLPQIPAPGSGVSFHIQIGLTREFVLLPAASELAHVKQLACSIVDQKFPECGFYGLYDKILLFKHDPTSANLLQLVRSSGDIQEGDLVEVVLSASATFEDFQIRPHALTVHSYRAPAFCDHCGEMLFGLVRQGLKCDGCGLNYHKRCAFSIPNNCSGARKRRLSSTSLASGHSVRLGTSESLPCTAEELSRSTTELLPRRPPSSSSSSSASSYTGRPIELDKMLLSKVKVPHTFLIHSYTRPTVCQACKKLLKGLFRQGLQCKDCKFNCHKRCATRVPNDCLGEALINGDVPMEEATDFSEADKSALMDESEDSGVIPGSHSENALHASEEEEGEGGKAQSSLGYIPLMRVVQSVRHTTRKSSTTLREGWVVHYSNKDTLRKRHYWRLDCKCITLFQNNTTNRYYKEIPLSEILTVESAQNFSLVPPGTNPHCFEIVTANATYFVGEMPGGTPGGPSGQGAEAARGWETAIRQALMPVILQDAPSAPGHAPHRQASLSISVSNSQIQENVDIATVYQIFPDEVLGSGQFGVVYGGKHRKTGRDVAVKVIDKLRFPTKQESQLRNEVAILQSLRHPGIVNLECMFETPEKVFVVMEKLHGDMLEMILSSEKGRLPERLTKFLITQILVALRHLHFKNIVHCDLKPENVLLASADPFPQVKLCDFGFARIIGEKSFRRSVVGTPAYLAPEVLLNQGYNRSLDMWSVGVIMYVSLSGTFPFNEDEDINDQIQNAAFMYPASPWSHISAGAIDLINNLLQVKMRKRYSVDKSLSHPWLQEYQTWLDLRELEGKMGERYITHESDDARWEQFAAEHPLPGSGLPTDRDLGGACPPQDHDMQGLAERISVL

SEQ ID NO: 121 - protein, 400 aa, Homo sapiens
MTSYSYRQSSATSSFGGLGGGSVRFGPGVAFRAPSIHGGSGGRGVSVSSARFVSSSSSGAYGGGYGGVLTASDGLLAGNEKLTMQNLNDRLASYLDKVRALEAANGELEVKIRDWYQKQGPGPSRDYSHYYTTIQDLRDKILGATIENSRIVLQIDNARLAADDFRTKFETEQALRMSVEADINGLRRVLDELTLARTDLEMQIEGLKEELAYLKKNHEEEISTLRGQVGGQVSVEVDSAPGTDLAKILSDMRSQYEVMAEQNRKDAEAWFTSRTEELNREVAGHTEQLQMSRSEVTDLRRTLQGLEIELQSQLSMKAALEDTLAETEARFGAQLAHIQALISGIEAQLGDVRADSERQNQEYQRLMDIKSRLEQEIATYRSLLEGQEDHYNNLSASKVL

SEQ ID NO: 122 - protein, 520 aa, Homo sapiens
MRSPEGYLRGNMSENEEEEISQQEGSGDYEVEEIPFGLEPQSPGFEPQSPEFEPQSPRFEPESPGFESRSPGLVPPSPEFAPRSPESDSQSPEFESQSPRYEPQSPGYEPRSPGYEPRSPGYESESSRYESQNTELKTQSPEFEAQSSKFQEGAEMLLNPDEKSPLNISVGVHPLDSFTQGFGEQPTGDLPIGPPFEMPTGALLSTPQFEMLQNPLGLTGALRGPGRRGGRARGGQGPRPNICGICGKSFGRGSTLIQHQRIHTGEKPYKCEVCSKAFSQSSDLIKHQRTHTGERPYKCPRCGKAFADSSYLLRHQRTHSGQKPYKCPHCGKAFGDSSYLLRHQRTHSHERPYSCTECGKCYSQNSSLRSHQRVHTGQRPFSCGICGKSFSQRSALIPHARSHAREKPFKCPECGKRFGQSSVLAIHARTHLPGRTYSCPDCGKTFNRSSTLIQHQRSHTGERPYRCAVCGKGFCRSSTLLQHHRVHSGERPYKCDDCGKAFSQSSDLIRHQRTHAAGRR

SEQ ID NO: 123 - protein, 383 aa, Homo sapiens
MERRARSSSRESRGRGGRTPHKENKRAKAERSGGGRGRQEAGPEPSGSGRAGTPGEPRAPAATVVDVDEVRGSGEEGTEVVALLESERPEEGTKSSGLGACEWLLVLISLLFIIMTFPFSIWFCVKVVQEYERVIIFRLGHLLPGRAKGPGLFFFLPCLDTYHKVDLRLQTLEIPFHEIVTKDMFIMEIDAICYYRMENASLLLSSLAHVSKAVQFLVQTTMKRLLAHRSLTEILLERKSIAQDAKVALDSVTCIWGIKVERIEIKDVRLPAGLQHSLAVEAEAQRQAKVRMIAAEAEKAASESLRMAAEILSGTPAAVQLRYLHTLQSLSTEKPSTVVLPLPFDLLNCLSSPSNRTQGSLPFPSPSKPVEPLNPKKKDSPML

SEQ ID NO: 124 - protein, 128 aa, Homo sapiens
MTSLFAQEIRLSKRHEEIVSQRLMLLQQMENKLGDQHTEKASQLQTVETAFKRNLSLLKDIEAAEKSLQTRIHPLPRPEVVSLETRYWASVEEYIPKWEQFLLGRAPYPFAVENQNEAENTIQNEAQR

SEQ ID NO: 125 - protein, 363 aa, Homo sapiens
MKGNSTLATTSKNITSGLHFGLVNISGNNESTLNCSQKPSDKHLDAIPILYYIIFVIGFLVNIVVVTLFCCQKGPKKVSSIYIFNLAVADLLLLATLPLWATYYSYRYDWLFGPVMCKVFGSFLTLNMFASIFFITCMSVDRYQSVIYPFLSQRRNPWQASYIVPLVWCMACLSSLPTFYFRDVRTIEYLGVNACIMAFPPEKYAQWSAGIALMKNILGFIIPLIFIATCYFGIRKHLLKTNSYGKNRITRDQVLKMAAAVVLAFIICWLPFHVLTFLDALAWMGVINSCEVIAVIDLALPFAILLGFTNSCVNPFLYCFVGNRFQQKLRSVFRVPITWLQGKRESMSCRKSSSLREMETFVS

SEQ ID NO: 126 - protein, 366 aa, Homo sapiens
MDFLNSSDQNLTSEELLNRMPSKILVSLTLSGLALMTTTINSLVIAAIIVTRKLHHPANYLICSLAVTDFLVAVLVMPFSIVYIVRESWIMGQVVCDIWLSVDITCCTCSILHLSAIALDRYRAITDAVEYARKRTPKHAGIMITIVWIISVFISMPPLFWRHQGTSRDDECIIKHDHIVSTIYSTFGAFYIPLALILILYYKIYRAAKTLYHKRQASRIAKEEVNGQVLLESGEKSTKSVSTSYVLEKSLSDPSTDFDKIHSTVRSLRSEFKHEKSWRRQKISGTRERKAATTLGLILGAFVICWLPFFVKELVVNVCDKCKISEEMSNFLAWLGYLNSLINPLIYTIFNEDFKKAFQKLVRCRC

SEQ ID NO: 127 - protein, 747 aa, Homo sapiens
MSKLKSSESVRVVVRCRPMNGKEKAASYDKVVDVDVKLGQVSVKNPKGTAHEMPKTFTFDAVYDWNAKQFELYDETFRPLVDSVLQGFNGTIFAYGQTGTGKTYTMEGIRGDPEKRGVIPNSFDHIFTHISRSQNQQYLVRASYLEIYQEEIRDLLSKDQTKRLELKERPDTGVYVKDLSSFVTKSVKEIEHVMNVGNQNRSVGATNMNEHSSRSHAIFVITIECSEVGLDGENHIRVGKLNLVDLAGSERQAKTGAQGERLKEATKINLSLSALGNVISALVDGKSTHIPYRDSKLTRLLQDSLGGNAKTVMVANVGPASYNVEETLTTLRYANRAKNIKNKPRVNEDPKDALLREFQEEIARLKAQLEKRSIGRRKRREKRREGGGSGGGGEEEEEEGEEGEEEGDDKDDYWREQQEKLEIEKRAIVEDHSLVAEEKMRLLKEKEKKMEDLRREKDAAEMLGAKIKAMESKLLVGGKNIVDHTNEQQKILEQKRQEIAEQKRREREIQQQMESRDEETLELKETYSSLQQEVDIKTKKLKKLFSKLQAVKAEIHDLQEEHIKERQELEQTQNELTRELKLKHLIIENFIPLEEKSKIMNRAFFDEEEDHWKLHPITRLENQQMMKRPVSAVGYKRPLSQHARMSMMIRPEARYRAENIVLLELDMPSRTTRDYEGPAIAPKVQAALDAALQDEDEIQVDASSFESTANKKSKARPKSGRKSGSSSSSSGTPASQLYPQSRGLVPK

SEQ ID NO: 128 - protein, 172 aa, Homo sapiens
MKATIILLLLAQVSWAGPFQQRGLFDFMLEDEASGIGPEVPDDRDFEPSLGPVCPFRCQCHLRVVQCSDLGLDKVPKDLPPDTTLLDLQNNKITEIKDGDFKNLKNLHVVYLHNNNISVVGSSDFCPPGHNTKKASYSGVSLFSNPVQYWEIQPSTFRCVYVRSAIQLGNYK

SEQ ID NO: 129 - protein, 268 aa, Homo sapiens
MEDFLLSNGYQLGKTIGEGTYSKVKEAFSKKHQRKVAIKVIDKMGGPEEFIQRFLPRELQIVRTLDHKNIIQVYEMLESADGKICLVMELAEGGDVFDCVLNGGPLPESRAKALFRQMVEAIRYCHGCGVAHRDLKCENALLQGFNLKLTDFGFAKVLPKSHRELSQTFCGSTAYAAPEVLQGIPHDSKKGDVWSMGVVLYVMLCASLPFDDTDIPKMLWQQQKGVSFPTHLSISADCQDLLKRLLEPDMILRPSIEEVSWHPWLAST

SEQ ID NO: 130 - protein, 133 aa, Homo sapiens
MRRSLRAGKRRQTAGRKSKSPPKVPIVIQDDSLPAGPPPQIRILKRPTSNGVVSSPNSTSRPTLPVKSLAQREAEYAEARKRILGSASPEEEQEKPILDRPTRISQPEDSRQPNNVIRQPLGPDGSQGFKQRR

SEQ ID NO: 131 - protein, 472 aa, Homo sapiens
MKSILDGLADTTFRTITTDLLYVGSNDIQYEDIKGDMASKLGYFPQKFPLTSFRGSPFQEKMTAGDNPQLVPADQVNITEFYNKSLSSFKENEENIQCGENFMDIECFMVLNPSQQLAIAVLSLTLGTFTVLENLLVLCVILHSRSLRCRPSYHFIGSLAVADLLGSVIFVYSFIDFHVFHRKDSRNVFLFKLGGVTASFTASVGSLFLTAIDRYISIHRPLAYKRIVTRPKAVVAFCLMWTIAIVIAVLPLLGWNCEKLQSVCSDIFPHIDETYLMFWIGVTSVLLLFIVYAYMYILWKAHSHAVRMIQRGTQKSIIIHTSEDGKVQVTRPDQARMDIRLAKTLVLILVVLIICWGPLLAIMVYDVFGKMNKLIKTVFAFCSMLCLLNSTVNPIIYALRSKDLRHAFRSMFPSCEGTAQPLDNSMGDSDCLHKHANNAASVHRAAESCIKSTVKIAKVTMSVSTDTSAEAL

SEQ ID NO: 132 - protein, 361 aa, Homo sapiens
MSTAREQPIFSTRAHVFQIDPATKRNWIPAGKHALTVSYFYDATRNVYRIISIGGAKAIINSTVTPNMTFTKTSQKFGQWADSRANTVYGLGFASEQHLTQFAEKFQEVKEAARLAREKSQDGGELTSPALGLASHQVPPSPLVSANGPGEEKLFRSQSADAPGPTERERLKKMLSEGSVGEVQWEAEFFALQDSNNKLAGALREANAAAAQWRQQLEAQRAEAERLRQRVAELEAQAASEVTPTGEKEGLGQGQSLEQLEALVQTKDQEIQTLKSQTGGPREALEAAEREETQQKVQDLETRNAELEHQLRAMERSLEEARAERERARAEVGRAAQLLDVRLFELSELREGLARLAEAAP

SEQ ID NO: 133 - protein, 362 aa, Homo sapiens
MGTEATEQVSWGHYSGDEEDAYSAEPLPELCYKADVQAFSRAFQPSVSLTVAALGLAGNGLVLATHLAARRAARSPTSAHLLQLALADLLLALTLPFAAAGALQGWSLGSATCRTISGLYSASFHAGFLFLACISADRYVAIARALPAGPRPSTPGRAHLVSVIVWLLSLLLALPALLFSQDGQREGQRRCRLIFPEGLTQTVKGASAVAQVALGFALPLGVMVACYALLGRTLLAARGPERRRALRVVVALVAAFVVLQLPYSLALLLDTADLLAARERSCPASKRKDVALLVTSGLALARCGLNPVLYAFLGLRFRQDLRRLLRGGSSPSGPQPRRGCPRRPRLSSCSAPTETHSLSWDN

SEQ ID NO: 134 - protein, 520 aa, Homo sapiens
MRVESGSAQERGILLESLSTLLEKTTASHEGRAPGNRELTDLLPPEVCSLLNPAAIYANNEISLRDVEVYGFDYDYTLAQYADALHPEIFSTARDILIEHYKYPEGIRKYDYNPSFAIRGLHYDIQKSLLMKIDAFHYVQLGTAYRGLQPVPDEEVIELYGGTQHIPLYQMSGFYGKGPSIKQFMDIFSLPEMALLSCVVDYFLGHSLEFDQAHLYKDVTDAIRDVHVKGLMYQWIEQDMEKYILRGDETFAVLSRLVAHGKQLFLITNSPFSFVDKGMRHMVGPDWRQLFDVVIVQADKPSFFTDRRKPFRKLDEKGSLQWDRITRLEKGKIYRQGNLFDFLRLTEWRGPRVLYFGDHLYSDLADLMLRHGWRTGAIIPELEREIRIINTEQYMHSLTWQQALTGLLERMQTYQDAESRQVLAAWMKERQELRCITKALFNAQFGSIFRTFHNPTYFSRRLVRFSDLYMASLSCLLNYRVDFTFYPRRTPLQHEAPLWMDQLCTGCMKTPFLGDMAHIR

SEQ ID NO: 135 - protein, 322 aa, Homo sapiens
MARCFSLVLLLTSIWTTRLLVQGSLRAEELSIQVSCRIMGITLVSKKANQQLNFTEAKEACRLLGLSLAGKDQVETALKASFETCSYGWVGDGFVVISRISPNPKCGKNGVGVLIWKVPVSRQFAAYCYNSSDTWTNSCIPEIITTKDPIFNTQTATQTTEFIVSDSTYSVASPYSTIPAPTTTPPAPASTSIPRRKKLICVTEVFMETSTMSTETEPFVENKAAFKNEAAGFGGVPTALLVLALLFFGAAAGLGFCYVKRYVKAFPFTNKNQQKEMIETKVVKEEKANDSNPNEESKKTDKNPEESKSPSKTTVRCLEAEV

SEQ ID NO: 136 - protein, 1202 aa, Homo sapiens
MGREQDLILAVKNGDVTGVQKLVAKVKATKTKLLGSTKRLNVNYQDADGFSALHHAALGGSLELIALLLEAQATVDIKDSNGMRPLHYAAWQGRLEPVRLLLRASAAVNAASLDGQIPLHLAAQYGHYEVSEMLLQHQSNPCLVNKAKKTPLDLACEFGRLKVAQLLLNSHLCVALLEGEAKDPCDPNYTTPLHLAAKNGHREVIRQLLRAGIEINRQTKTGTALHEAALYGKTEVVRLLLEGGVDVNIRNTYNQTALDIVNQFTTSQASREIKQLLREASGILKVRALKDFWNLHDPTALNVRAGDVITVLEQHPDGRWKGHIHESQRGTDRIGYFPPGIVEVVSKRVGIPAARLPSAPTPLRPGFSRTPQPPAEEPPHPLTYSQLPRVGLSPDSPAGDRNSVGSEGSVGSIRSAGSGQSSEGTNGHGPGLLIENAQPLPSAGEDQVLPGLHPPSLADNLSHRPLANCRSGEQIFTQDVRPEQLLEGKDAQAIHNWLSEFQLEGYTAHFLQAGYDVPTISRMTPEDLTAIGVTKPGHRKKIASEIAQLSIAEWLPSYIPTDLLEWLCALGLPQYHKQLVSSGYDSMGLVADLTWEELQEIGVNKLGHQKKLMLGVKRLAELRRGLLQGEALSEGGRRLAKGPELMAIEGLENGEGPATAGPRLLTFQGSELSPELQAAMAGGGPEPLPLPPARSPSQESIGARSRGSGHSQEQPAPQPSGGDPSPPQERNLPEGTERPPKLCSSLPGQGPPPYVFMYPQGSPSSPAPGPPPGAPWAFSYLAGPPATPPDPPRPKRRSHSLSRPGPTEGDAEGEAEGPVGSTLGSYATLTRRPGRSALVRTSPSVTPTPARGTPRSQSFALRARRKGPPPPPPKRLSSVSGPSPEPPPLDGSPGPKEGATGPRRRTLSEPAGPSEPPGPPAPAGPASDTEEEEPGPEGTPPSRGSSGEGLPFAEEGNLTIKQRPKPAGPPPRETPVPPGLDFNLTESDTVKRRPKCREREPLQTALLAFGVASATPGPAAPLPSPTPGESPPASSLPQPEPSSLPAQGVPTPLAPSPAMQPPVPPCPGPGLESSAASRWNGETEPPAAPAALLKVPGAGTAPKPVSVACTQLAFSGPKLAPRLGPRPVPPPRPESTGTVGPGQAQQRLEQTSSSLAAALRAAEKSIGTKEQEGTPSASTKHILDDISTMFDALADQLDAMLD

SEQ ID NO: 137 - protein, 1496 aa, Homo sapiens
MMANWAEARPLLILIVLLGQFVSIKAQEEDEDEGYGEEIACTQNGQMYLNRDIWKPAPCQICVCDNGAILCDKIECQDVLDCADPVTPPGECCPVCSQTPGGGNTNFGRGRKGQKGEPGLVPVVTGIRGRPGPAGPPGSQGPRGERGPKGRPGPRGPQGIDGEPGVPGQPGAPGPPGHPSHPGPDGLSRPFSAQMAGLDEKSGLGSQVGLMPGSVGPVGPRGPQGLQGQQGGAGPTGPPGEPGDPGPMGPIGSRGPEGPPGKPGEDGEPGRNGNPGEVGFAGSPGARGFPGAPGLPGLKGHRGHKGLEGPKGEVGAPGSKGEAGPTGPMGAMGPLGPRGMPGERGRLGPQGAPGQRGAHGMPGKPGPMGPLGIPGSSGFPGNPGMKGEAGPTGARGPEGPQGQRGETGPPGPVGSPGLPGAIGTDGTPGPKGPTGSPGTSGPPGSAGPPGSPGPQGSTGPQGNSGLPGDPGFKGEAGPKGEPGPHGIQGPIGPPGEEGKRGPRGDPGTLGPPGPVGERGAPGNRGFPGSDGLPGPKGAQGERGPVGSSGPKGSQGDPGRPGEPGLPGARGLTGNPGVQGPEGKLGPLGAPGEDGRPGPPGSIGIKGQPGTMGLPGPKGSNGDPGKPGEAGNPGVPGQRGAPGKDGKVGPYGPPGPPGLRGERGEQGPPGPTGFQGHPGPPGPPGEGGKPGDQGVPGGPGAVGPLGPRGERGNPGERGEPGITGLPGEKGMAGGHGPDGPKGSPGPSGTPGDTGPPGLQGMPGERGIAGTPGPKGDRGGIGEKGAEGTAGNDGAGGLPGPLGPPGPAGLLGEKGEPGPRGLVGPPGSRGNPGSRGENGPTGAVGFAGPQGSDGQPGVKGEPGEPGQKGDAGSPGPQGLAGSPGPHGPNGVPGLKGGRGTQGPPGATGFPGSAGRVGPPGPAGAPGPAGPLGEPGKEGPPGPRGDPGSHGRVGVRGPAGPPGGPGDKGDPGEDGQPGPDGPPGPAGTTGQRGIVGMPGQRGERGMPGLPGPAGTPGKVGPTGATGDKGPPGPVGPPGSNGPVGEPGPEGPAGNDGTPGRDGAVGERGDRGDPGPAGLPGSQGAPGTPGPVGAPGDAGQRGDPGSRGPIGHLGRAGKRGLPGPQGPRGDKGDHGDRGDRGQKGHRGFTGLQGLPGPPGPNGEQGSAGIPGPFGPRGPPGPVGPSGKEGNPGPLGPLGPPGVRGSVGEAGPEGPPGEPGPPGPPGPPGHLTAALGDIMGHYDESMPDPLPEFTEDQAAPDDKNKTDPGVHATLKSLSSQIETMRSPDGSKKHPARTCDDLKLCHSAKQSGEYWIDPNQGSVEDAIKVYCNMETGETCISANPSSVPRKTWWASKSPDNKPVWYGLDMNRGSQFAYGDHQSPNTAITQMTFLRLLSKEASQNITYICKNSVGYMDDQAKNLKKAVVLKGANDLDIKAEGNIRFRYIVLQDTCSKRNGNVGKTVFEYRTQNVARLPIIDLAPVDVGGTDQEFGVEIGPVCFV

SEQ ID NO: 138 - protein, 726 aa, Homo sapiens
MSTATTVAPAGIPATPGPVNPPPPEVSNPSKPGRKTNQLQYMQNVVVKTLWKHQFAWPFYQPVDAIKLNLPDYHKIIKNPMDMGTIKKRLENNYYWSASECMQDFNTMFTNCYIYNKPTDDIVLMAQALEKIFLQKVAQMPQEEVELLPPAPKGKGRKPAAGAQSAGTQQVAAVSSVSPATPFQSVPPTVSQTPVIAATPVPTITANVTSVPVPPAAAPPPPATPIVPVVPPTPPVVKKKGVKRKADTTTPTTSAITASRSESPPPLSDPKQAKVVARRESGGRPIKPPKKDLEDGEVPQHAGKKGKLSEHLRYCDSILREMLSKKHAAYAWPFYKPVDAEALELHDYHDIIKHPMDLSTVKRKMDGREYPDAQGFAADVRLMFSNCYKYNPPDHEVVAMARKLQDVFEMRFAKMPDEPVEAPALPAPAAPMVSKGAESSRSSEESSSDSGSSDSEEERATRLAELQEQLKAVHEQLAALSQAPVNKPKKKKEKKEKEKKKKDKEKEKEKHKVKAEEEKKAKVAPPAKQAQQKKAPAKKANSTTTAGRQLKKGGKQASASYDSEEEEEGLPMSYDEKRQLSLDINRLPGEKLGRVVHIIQSREPSLRDSNPDEIEIDFETLKPTTLRELERYVKSCLQKKQRKPFSASGKKQAAKSKEELAQEKKKELEKRLQDVSGQLSSSKKPARKEKPGSAPSGGPSRLSSSSSSESGSSSSSGSSSDSSDSE

SEQ ID NO: 139 - protein, 840 aa, Homo sapiens
MASVFRSEEMCLSQLFLQVEAAYCCVAELGELGLVQFKDLNMNVNSFQRKFVNEVRRCESLERILRFLEDEMQNEIVVQLLEKSPLTPLPREMITLETVLEKLEGELQEANQNQQALKQSFLELTELKYLLKKTQDFFETETNLADDFFTEDTSGLLELKAVPAYMTGKLGFIAGVINRERMASFERLLWRICRGNVYLKFSEMDAPLEDPVTKEEIQKNIFIIFYQGEQLRQKIKKICDGFRATVYPCPEPAVERREMLESVNVRLEDLITVITQTESHRQRLLQEAAANWHSWLIKVQKMKAVYHILNMCNIDVTQQCVIAEIWFPVADATRIKRALEQGMELSGSSMAPIMTTVQSKTAPPTFNRTNKFTAGFQNIVDAYGVGSYREINPAPYTIITFPFLFAVMFGDCGHGTVMLLAALWMILNERRLLSQKTDNEIWNTFFHGRYLILLMGIFSIYTGLIYNDCFSKSLNIFGSSWSVQPMFRNGTWNTHVMEESLYLQLDPAIPGVYFGNPYPFGIDPIWNLASNKLTFLNSYKMKMSVILGIVQMVFGVILSLFNHIYFRRTLNIILQFIPEMIFILCLFGYLVFMIIFKWCCFDVHVSQHAPSILIHFINMFLFNYSDSSNAPLYKHQQEVQSFFVVMALISVPWMLLIKPFILRASHRKSQLQASRIQEDATENIEGDSSSPSSRSGQRTSADTHGALDDHGEEFNFGDVFVHQAIHTIEYCLGCISNTASYLRLWALSLAHAQLSEVLWTMVMNSGLQTRGWGGIVGVFIIFAVFAVLTVAILLIMEGLSAFLHALRLHWVEFQNKFYVGDGYKFSPFSFKHILDGTAEE

SEQ ID NO: 140 - protein, 826 aa, Homo sapiens [sequence omitted]

SEQ ID NO: 141 - protein, 987 aa, Homo sapiens
MALRRLGAALLLLPLLAAVEETLMDSTTATAELGWMVHPPSGWEEVSGYDENMNTIRTYQVCNVFESSQNNWLRTKFIRRRGAHRIHVEMKFSVRDCSSIPSVPGSCKETFNLYYYEADFDSATKTFPNWMENPWVKVDTIAADESFSQVDLGGRVMKINTEVRSFGPVSRSGFYLAFQDYGGCMSLIAVRVFYRKCPRIIQNGAIFQETLSGAESTSLVAARGSCIANAEEVDVPIKLYCNGDGEWLVPIGRCMCKAGFEAVENGTVCRGCPSGTFKANQGDEACTHCPINSRTTSEGATNCVCRNGYYRADLDPLDMPCTTIPSAPQAVISSVNETSLMLEWTPPRDSGGREDLVYNIICKSCGSGRGACTRCGDNVQYAPRQLGLTEPRIYISDLLAHTQYTFEIQAVNGVTDQSPFSPQFASVNITTNQAAPSAVSIMHQVSRTVDSITLSWSQPDQPNGVILDYELQYYEKELSEYNATAIKSPTNTVTVQGLKAGAIYVFQVRARTVAGYGRYSGKMYFQTMTEAEYQTSIQEKLPLIIGSSAAGLVFLIAVVVIAIVCNRRRGFERADSEYTDKLQHYTSGHMTPGMKIYIDPFTYEDPNEAVREFAKEIDISCVKIEQVIGAGEFGEVCSGHLKLPGKREIFVAIKTLKSGYTEKQRRDFLSEASIMGQFDHPNVIHLEGVVTKSTPVMIITEFMENGSLDSFLRQNDGQFTVIQLVGMLRGIAAGMKYLADMNYVHRDLAARNILVNSNLVCKVSDFGLSRFLEDDTSDPTYTSALGGKIPIRWTAPEAIQYRKFTSASDVWSYGIVMWEVMSYGERPYWDMTNQDVINAIEQDYRLPPPMDCPSALHQLMLDCWQKDRNHRPKFGQIVNTLDKMIRNPNSLKAMAPLSSGINLPLLDRTIPDYTSFNTVDEWLEAIKMGQYKESFANAGFTSFDVVSQMMMEDILRVGVTLAGHQKKILNSIQVMRAQMNQIQSVEV

SEQ ID NO: 142 - protein, 379 aa, Homo sapiens
MVFFTCNACGESVKKIQVEKHVSVCRNCECLSCIDCGKDFWGDDYKNHVKCISEDQKYGGKGYEGKTHKGDIKQQAWIQKISELIKRPNVSPKVRELLEQISAFDNVPRKKAKFQNWMKNSLKVHNESILDQVWNIFSEASNSEPVNKEQDQRPLHPVANPHAEISTKVPASKVKDAVEQQGEVKKNKRERKEERQKKRKREKKELKLENHQENSRNQKPKKRKKGQEADLEAGGEEVPEANGSAGKRSKKKKQRKDSASEEEARVGAGKRKRRHSEVETDSKKKKMKLPEHPEGGEPEDDEAPAKGKFNWKGTIKAILKQAPDNEITIKKLRKKVLAQYYTVTDEHHRSEEELLVIFNKKISKNPTFKLLKDKVKLVK

SEQ ID NO: 143 - protein, 86 aa, Homo sapiens
MAEDMETKIKNYKTAPFDSRFPNQNQTRNCWQNYLDFHRCQKAMTAKGGDISVCEWYQRVYQSLCPTSWVTDWDEQRAEGTFPGKI

SEQ ID NO: 144 - protein, 166 aa, Homo sapiens
MLLILLSVALLAFSSAQDLNEDVSQEDVPLVISDGGDSEQFIDEERQGPPLGGQQSQPSAGDGNQDDGPQQGPPQQGGQQQQGPPPPQGKPQGPPQQGGHPPPPQGRPQGPPQQGGHPRPPRGRPQGPPQQGGHQQGPPPPPPGKPQGPPPQGGRPQGPPQGQSPQ

SEQ ID NO: 145 - protein, 262 aa, Homo sapiens
MDPRLSTVRQTCCCFNVRIATTALAIYHVIMSVLLFIEHSVEVAHGKASCKLSQMGYLRIADLISSFLLITMLFIISLSLLIGVVKNREKYLLPFLSLQIMDYLLCLLTLLGSYIELPAYLKLASRSRASSSKFPLMTLQLLDFCLSILTLCSSYMEVPTYLNFKSMNHMNYLPSQEDMPHNQFIKMMIIFSIAFITVLIFKVYMFKCVWRCYRLIKCMNSVEEKRNSKMLQKVVLPSYEEALSLPSKTPEGGPAPPPYSEV

SEQ ID NO: 146 - protein, 772 aa, Homo sapiens
MGDEDDDESCAVELRITEANLTGHEEKVSVENFELLKVLGTGAYGKVFLVRKAGGHDAGKLYAMKVLRKAALVQRAKTQEHTRTERSVLELVRQAPFLVTLHYAFQTDAKLHLILDYVSGGEMFTHLYQRQYFKEAEVRVYGGEIVLALEHLHKLGIIYRDLKLENVLLDSEGHIVLTDFGLSKEFLTEEKERTFSFCGTIEYMAPEIIRSKTGHGKAVDWWSLGILLFELLTGASPFTLEGERNTQAEVSRRILKCSPPFPPRIGPVAQDLLQRLLCKDPKKRLGAGPQGAQEVRNHPFFQGLDWVALAARKIPAPFRPQIRSELDVGNFAEEFTRLEPVYSPPGSPPPGDPRIFQGYSFVAPSILFDHNNAVMTDGLEAPGAGDRPGRAAVARSAMMQDSPFFQQYELDLREPALGQGSFSVCRRCRQRQSGQEFAVKILSRRLEANTQREVAALRLCQSHPNVVNLHEVHHDQLHTYLVLELLRGGELLEHIRKKRHFSESEASQILRSLVSAVSFMHEEAGVVHRDLKPENILYADDTPGAPVKIIDFGFARLRPQSPGVPMQTPCFTLQYAAPELLAQQGYDESCDLWSLGVILYMMLSGQVPFQGASGQGGQSQAAEIMCKIREGRFSLDGEAWQGVSEEAKELVRGLLTVDPAKRLKLEGLRGSSWLQDGSARSSPPLRTPDVLESSGPAVRSGLNATFMAFNRGKREGFFLKSVENAPLAKRRKQKLRSATASRRGSPAPANPGRAPVASKGAPRRANGPLPPS

SEQ ID NO: 147 - protein, 1684 aa, Homo sapiens
MEDLVQDGVASPATPGTGKSKLETLPKEDLIKFAKKQMMLIQKAKSRCTELEKEIEELRSKPVTEGTGDIIKALTERLDALLLEKAETEQQCLSLKKENIKMKQEVEDSVTKMGDAHKELEQSHINYVKEIENLKNELMAVRSKYSEDKANLQKQLEEAMNTQLELSEQLKFQNNSEDNVKKLQEEIEKIRPGFEEQILYLQKQLDATTDEKKETVTQLQNIIEANSQHYQKNINSLQEELLQLKAIHQEEVKELMCQIEASAKEHEAEINKLNELKENLVKQCEASEKNIQKKYECELENLRKATSNANQDNQICSILLQENTFVEQVVNEKVKHLEDTLKELESQHSILKDEVTYMNNLKLKLEMDAQHIKDEFFHEREDLEFKINELLLAKEEQGCVIEKLKSELAGLNKQFCYTVEQHNREVQSLKEQHQKEISELNETFLSDSEKEKLTLMFEIQGLKEQCENLQQEKQEAILNYESLREIMEILQTELGESAGKISQEFESMKQQQASDVHELQQKLRTAFTEKDALLETVNRLQGENEKLLSQQELVPELENTIKNLQEKNGVYLLSLSQRDTMLKELEGKINSLTEEKDDFINKLKNSHEEMDNFHKKCEREERLILELGKKVEQTIQYNSELEQKVNELTGGLEETLKEKDQNDQKLEKLMVQMKVLSEDKEVLSAEVKSLYEENNKLSSEKKQLSRDLEVFLSQKEDVILKEHITQLEKKLQLMVEEQDNLNKLLENEQVQKLFVKTQLYGFLKEMGSEVSEDSEEKDVVNVLQAVGESLAKINEEKCNLAFQRDEKVLELEKEIKCLQEESVVQCEELKSLLRDYEQEKVLLRKELEEIQSEKEALQSDLLEMKNANEKTRLENQNLLIQVEEVSQTCSKSEIHNEKEKCFIKEHENLKPLLEQKELRDRRAELILLKDSLAKSPSVKNDPLSSVKELEEKIENLEKECKEKEEKINKIKLVAVKAKKELDSSRKETQTVKEELESLRSEKDQLSASMRDLIQGAESYKNLLLEYEKQSEQLDVEKERANNFEHRIEDLTRQLRNSTLQCETINSDNEDLLARIETLQSNAKLLEVQILEVQRAKAMVDKELEAEKLQKEQKIKEHATTVNELEELQVQLQKEKKQLQKTMQELELVKKDAQQTTLMNMEIADYERLMKELNQKLTNKNNKIEDLEQEIKIQKQKQETLQEEITSLQSSVQQYEEKNTKIKQLLVKTKKELADSKQAETDHLILQASLKGELEASQQQVEVYKIQLAEITSEKHKIHEHLKTSAEQHQRTLSAYQQRVTALQEECRAAKAEQATVTSEFESYKVRVHNVLKQQKNKSMSQAETEGAKQEREHLEMLIDQLKIKLQDSQNNLQINVSELQTLQSEHDTLLERHNKMLQETVSKEAELREKLCSIQSENMMMKSEHTQTVSQLTSQNEVLRNSFRDQVRHLQEEHRKTVETLQQQLSKMEAQLFQLKNEPTTRSPVSSQQSLKNLRERRNTDLPLLDMHTVTREEGEGMETTDTESVSSASTYTQSLEQLLNSPETKLEPPLWHAEFTKEELVQKLSSTTKSADHLNGLLRETEATNAILMEQIKLLKSEIRRLERNQEREKSAANLEYLKNVLLQFIFLKPGSERERLLPVINTMLQLSPEEKGKLAAVAQGEEENASRSSGWASYLHSWSGLR

SEQ ID NO: 148 - protein, 288 aa, Homo sapiens
MVGVGGGDVEDVTPRPGGCQISGRAARGCNGIPGAAAWEAALPRRRPRRHPSVNPRSRAAGSPRTRGRRTEERPSGSRLGDRGRGRALPGGRLGGRGRGRAPERVGGRGRGRGTAAPRAAPAARGSRPGPAGTMAAGSITTLPALPEDGGSGAFPPGHFKDPKRLYCKNGGFFLRIHPDGRVDGVREKSDPHIKLQLQAEERGVVSIKGVCANRYLAMKEDGRLLASKCVTDECFFFERLESNNYNTYRSRKYTSWYVALKRTGQYKLGSKTGPGQKAILFLPMSAKS

SEQ ID NO: 149 - protein, 582 aa, Homo sapiens
MSPAPRPPRCLLLPLLTLGTALASLGSAQSSSFSPEAWLQQYGYLPPGDLRTHTQRSPQSLSAAIAAMQKFYGLQVTGKADADTMKAMRRPRCGVPDKFGAEIKANVRRKRYAIQGLKWQHNEITFCIQNYTPKVGEYATYEAIRKAFRVWESATPLRFREVPYAYIREGHEKQADIMIFFAEGFHGDSTPFDGEGGFLAHAYFPGPNIGGDTHFDSAEPWTVRNEDLNGNDIFLVAVHELGHALGLEHSSDPSAIMAPFYQWMDTENFVLPDDDRRGIQQLYGGESGFPTKMPPQPRTTSRPSVPDKPKNPTYGPNICDGNFDTVAMLRGEMFVFKERWFWRVRNNQVMDGYPMPIGQFWRGLPASINTAYERKDGKFVFFKGDKHWVFDEASLEPGYPKHIKELGRGLPTDKIDAALFWMPNGKTYFFRGNKYYRFNEELRAVDSEYPKNIKVWEGIPESPRGSFMGSDEVFTYFYKGNKYWKFNNQKLKVEPGYPKSALRDWMGCPSGGRPDEGTEEETEVIIIEVDEEGGGAVSAAAVVLPVLLLLLVLAVGLAVFFFRRHGTPRRLLYCQRSLLDKV

SEQ ID NO: 150 - protein, 1255 aa, Homo sapiens [sequence omitted]

SEQ ID NO: 151 - protein, 552 aa, Homo sapiens
MAEKQKHDGRVKIGHYVLGDTLGVGTFGKVKIGEHQLTGHKVAVKILNRQKIRSLDVVGKIKREIQNLKLFRHPHIIKLYQVISTPTDFFMVMEYVSGGELFDYICKHGRVEEMEARRLFQQILSAVDYCHRHMVVHRDLKPENVLLDAHMNAKIADFGLSNMMSDGEFLRTSCGSPNYAAPEVISGRLYAGPEVDIWSCGVILYALLCGTLPFDDEHVPTLFKKIRGGVFYIPEYLNRSVATLLMHMLQVDPLKRATIKDIREHEWFKQDLPSYLFPEDPSYDANVIDDEAVKEVCEKFECTESEVMNSLYSGDPQDQLAVAYHLIIDNRRIMNQASEFYLASSPPSGSFMDDSAMHIPPGLKPHPERMPPLIADSPKARCPLDALNTTKPKSLAVKKAKWHLGIRSQSKPYDIMAEVYRAMKQLDFEWKVVNAYHLRVRRKNPVTGNYVKMSLQLYLVDNRSYLLDFKSIDDEVVEQRSGSSTPQRSCSAAGLHRPRSSFDSTTAESHSLSGSLTGSLTGSTLSSVSPRLGSHTMDFFEMCASLITTLAR

SEQ ID NO: 152 - protein, 837 aa, Homo sapiens
MFLWLFLILSALISSTNADSDISVEICNVCSCVSVENVLYVNCEKVSVYRPNQLKPPWSNFYHLNFQNNFLNILYPNTFLNFSHAVSLHLGNNKLQNIEGGAFLGLSALKQLHLNNNELKILRADTFLGIENLEYLQADYNLIKYIERGAFNKLHKLKVLILNDNLISFLPDNIFRFASLTHLDIRGNRIQKLPYIGVLEHIGRVVELQLEDNPWNCSCDLLPLKAWLENMPYNIYIGEAICETPSDLYGRLLKETNKQELCPMGTGSDFDVRILPPSQLENGYTTPNGHTTQTSLHRLVTKPPKTTNPSKISGIVAGKALSNRNLSQIVSYQTRVPPLTPCPAPCFCKTHPSDLGLSVNCQEKNIQSMSELIPKPLNAKKLHVNGNSIKDVDVSDFTDFEGLDLLHLGSNQITVIKGDVFHNLTNLRRLYLNGNQIERLYPEIFSGLHNLQYLYLEYNLIKEISAGTFDSMPNLQLLYLNNNLLKSLPVYIFSGAPLARLNLRNNKFMYLPVSGVLDQLQSLTQIDLEGNPWDCTCDLVALKLWVEKLSDGIVVKELKCETPVQFANIELKSLKNEILCPKLLNKPSAPFTSPAPAITFTTPLGPIRSPPGGPVPLSILILSILVVLILTVFVAFCLLVFVLRRNKKPTVKHEGLGNPDCGSMQLQLRKHDHKTNKKDGLSTEAFIPQTIEQMSKSHTCGLKESETGFMFSDPPGQKVVMRNVADKEKDLLHVDTRKRLSTIDELDELFPSRDSNVFIQNFLESKKEYNSIGVSGFEIRYPEKQPDKKSKKSLIGGNHSKIVVEQRKSEYFELKAKLQSSPDYLQVLEEQTALNKI

SEQ ID NO: 153 - protein, 379 aa, Homo sapiens
MPRSSRSPGDPGALLEDVAHNPRPRRIAQRGRNTSRMAEDTSPNMNDNILLPVRNNDQALGLTQCMLGCVSWFTCFACSLRTQAQQVLFNTCRCKLLCQKLMEKTGILLLCAFGFWMFSIHLPSKMKVWQDDSINGPLQSLRLYQEKVRHHSGEIQDLRGSMNQLIAKLQEMEAMSDEQKMAQKIMKMIHGDYIEKPDFALKSIGASIDFEHTSVTYNHEKAHSYWNWIQLWNYAQPPDVILEPNVTPGNCWAFEGDRGQVTIQLAQKVYLSNLTLQHIPKTISLSGSLDTAPKDFVIYGMEGSPKEEVFLGAFQFQPENIIQMFPLQNQPARAFSAVKVKISSNWGNPGFTCLYRVRVHGSVAPPREQPHQNPYPKRD

SEQ ID NO: 154 - protein, 601 aa, Homo sapiens
MHPLQCVLQVQRSLGWGPLASVSWLSLRMCRAHSSLSSTMCPSPERQEDGARKDFSSRLAAGPTFQHFLKSASAPQEKLSSEVEDPPPYLMMDELLGRQRKVYLETYGCQMNVNDTEIAWSILQKSGYLRTSNLQEADVILLVTCSIREKAEQTIWNRLHQLKALKTRRPRSRVPLRIGILGCMAERLKEEILNREKMVDILAGPDAYRDLPRLLAVAESGQQAANVLLSLDETYADVMPVQTSASATSAFVSIMRGCDNMCSYCIVPFTRGRERSRPIASILEEVKKLSEQVFLPPRPPKVLGLQGLKEVTLLGQNVNSFRDNSEVQFNSAVPTNLSRGFTTNYKTKQGGLRFAHLLDQVSRVDPEMRIRFTSPHPKDFPDEVLQLIHERDNICKQIHLPAQSGSSRVLEAMRRGYSREAYVELVHHIRESIPGVSLSSDFIAGFCGETEEDHVQTVSLLREVQYNMGFLFAYSMRQKTRAYHRLKDDVPEEVKLRRLEELITIFREEATKANQTSVGCTQLVLVEGLSKRSATDLCGRNDGNLKVIFPDAEMEDVNNPGLRVRAQPGDYVLVKITSASSQTLRGHVLCRTTLRDSSAYC

SEQ ID NO: 155 - protein, 356 aa, Homo sapiens
MSPCGRARRQTSRGAMAVLAWKFPRTRLPMGASALCVVVLCWLYIFPVYRLPNEKEIVQGVLQQGTAWRRNQTAARAFRKQMEDCCDPAHLFAMTKMNSPMGKSMWYDGEFLYSFTIDNSTYSLFPQATPFQLPLKKCAVVGNGGILKKSGCGRQIDEANFVMRCNLPPLSSEYTKDVGSKSQLVTANPSIIRQRFQNLLWSRKTFVDNMKIYNHSYIYMPAFSMKTGTEPSLRVYYTLSDVGANQTVLFANPNFLRSIGKFWKSRGIHAKRLSTGLFLVSAALGLCEEVAIYGFWPFSVNMHEQPISHHYYDNVLPFSGFHAMPEEFLQLWYLHKIGALRMQLDPCEDTSLQPTS

SEQ ID NO: 156 - protein, 404 aa, Homo sapiens
MSHIQIPPGLTELLQGYTVEVLRQQPPDLVEFAVEYFTRLREARAPASVLPAATPRQSLGHPPPEPGPDRVADAKGDSESEEDEDLEVPVPSRFNRRVSVCAETYNPDEEEEDTDPRVIHPKTDEQRCRLQEACKDILLFKNLDQEQLSQVLDAMFERIVKADEHVIDQGDDGDNFYVIERGTYDILVTKDNQTRSVGQYDNRGSFGELALMYNTPRAATIVATSEGSLWGLDRVTFRRIIVKNNAKKRKMFESFIESVPLLKSLEVSERMKIVDVIGEKIYKDGERIITQGEKADSFYIIESGEVSILIRSRTKSNKDGGNQEVEIARCHKGQYFGELALVTNKPRAASAYAVGDVKCLVMDVQAFERLLGPCMDIMKRNISHYEEQLVKMFGSSVDLGNLGQ

SEQ ID NO: 157 - protein, 505 aa, Homo sapiens
MSGASSSEQNNNSYETKTPNLRMSEKKCSWASYMTNSPTLIVMIGLPARGKTYVSKKLTRYLNWIGVPTKVFNLGVYRREAVKSYKSYDFFRHDNEEAMKIRKQCALVALEDVKAYLTEENGQIAVFDATNTTRERRDMILNFAEQNSFKVFFVESVCDDPDVIAANILEVKVSSPDYPERNRENVMEDFLKRIECYKVTYRPLDPDNYDKDLSFIKVINVGQRFLVNRVQDYIQSKIVYYLMNIHVQPRTIYLCRHGESEFNLLGKIGGDSGLSVRGKQFAQALRKFLEEQEITDLKVWTSQLKRTIQTAESLGVPYEQWKILNEIDAGVCEEMTYAEIEKRYPEEFALRDQEKYLYRYPGGESYQDLVQRLEPVIMELERQGNVLVISHQAVMRCLLAYFLDKGADELPYLRCPLHTIFKLTPVAYGCKVETIKLNVEAVNTHRDKPTNNFPKNQTPVRMRRNSFTPLSSSNTIRRPRNYSVGSRPLKPLSPLRAQDMQEGAD

SEQ ID NO: 158 - protein, 543 aa, Homo sapiens
MMPTPVILLKEGTDSSQGIPQLVSNISACQVIAEAVRTTLGPRGMDKLIVDGRGKATISNDGATILKLLDVVHPAAKTLVDIAKSQDAEVGDGTTSVTLLAAEFLKQVKPYVEEGLHPQIIIRAFRTATQLAVNKIKEIAVTVKKADKVEQRKLLEKCAMTALSSKLISQQKAFFAKMVVDAVMMLDDLLQLKMIGIKKVQGGALEDSQLVAGVAFKKTFSYAGFEMQPKKYHNPKIALLNVELELKAEKDNAEIRVHTVEDYQAIVDAEWNILYDKLEKIHHSGAKVVLSKLPIGDVATQYFADRDMFCAGRVPEEDLKRTMMACGGSIQTSVNALSADVLGRCQVFEETQIGGERYNFFTGCPKAKTCTFILRGGAEQFMEETERSLHDAIMIVRRAIKNDSVVAGGGAIEMELSKYLRDYSRTIPGKQQLLIGAYAKALEIIPRQLCDNAGFDATNILNKLRARHAQGGTWYGVDINNEDIADNFEAFVWEPAMVRINALTAASEAACLIVSVDETIKNPRSTVDAPTAAGRGRGRGRPH

SEQ ID NO: 159 - protein, 359 aa, Homo sapiens
MTLESMMACCLSDEVKESKRINAEIEKQLRRDKRDARRELKLLLLGTGESGKSTFIKQMRIIHGAGYSEEDKRGFTKLVYQNIFTAMQAMIRAMETLKILYKYEQNKANALLIREVDVEKVTTFEHQYVSAIKTLWEDPGIQECYDRRREYQLSDSAKYYLTDVDRIATLGYLPTQQDVLRVRVPTTGIIEYPFDLENIIFRMVDVGGQRSERRKWIHCFENVTSIMFLVALSEYDQVLVESDNENRMEESKALFRTIITYPWFQNSSVILFLNKKDLLEDKILYSHLVDYFPEFDGPQRDAQAAREFILKMFVDLNPDSDKIIYSHFTCATDTENIRFVFAAVKDTILQLNLKEYNLV

SEQ ID NO: 160 - protein, 704 aa, Homo sapiens
MANENHGSPREEASLLSHSPGTSNQSQPCSPKPIRLVQDLPEELVHAGWEKCWSRRENRPYYFNRFTNQSLWEMPVLGQHDVISDPLGLNATPLPQDSSLVETPPAENKPRKRQLSEEQPSGNGVKKPKIEIPVTPTGQSVPSSPSIPGTPTLKMWGTSPEDKQQAALLRPTEVYWDLDIQTNAVIKHRGPSEVLPPHPEVELLRSQLILKLRQHYRELCQQREGIEPPRESFNRWMLERKVVDKGSDPLLPSNCEPVVSPSMFREIMNDIPIRLSRIKFREEAKRLLFKYAEAARRLIESRSASPDSRKVVKWNVEDTFSWLRKDHSASKEDYMDRLEHLRRQCGPHVSAAAKDSVEGICSKIYHISLEYVKRIREKHLAILKENNISEEVEAPEVEPRLVYCYPVRLAVSAPPMPSVEMHMENNVVCIRYKGEMVKVSRNYFSKLWLLYRYSCIDDSAFERFLPRVWCLLRRYQMMFGVGLYEGTGLQGSLPVHVFEALHRLFGVSFECFASPLNCYFRQYCSAFPDTDGYFGSRGPCLDFAPLSGSFEANPPFCEELMDAMVSHFERLLESSPEPLSFIVFIPEWREPPTPALTRMEQSRFKRHQLILPAFEHEYRSGSQHICKKEEMHYKAVHNTAVLFLQNDPGFAKWAPTPERLQELSAAYRQSGRSHSSGSSSSSSSEAKDRDSGREQGPSREPHPT

SEQ ID NO: 161 - protein, 573 aa, Homo sapiens
MLGSLGLWALLPTAVEAPPNRRTCVFFEAPGVRGSTKTLGELLDTGTELPRAIRCLYSRCCFGIWNLTQDRAQVEMQGCRDSDEPGCESLHCDPSPRAHPSPGSTLFTCSCGTDFCNANYSHLPPPGSPGTPGSQGPQAAPGESIWMALVLLGLFLLLLLLLGSIILALLQRKNYRVRGEPVPEPRPDSGRDWSVELQELPELCFSQVIREGGHAVVWAGQLQGKLVAIKAFPPRSVAQFQAERALYELPGLQHDHIVRFITASRGGPGRLLSGPLLVLELHPKGSLCHYLTQYTSDWGSSLRMALSLAQGLAFLHEERWQNGQYKPGIAHRDLSSQNVLIREDGSCAIGDLGLALVLPGLTQPPAWTPTQPQGPAAIMEAGTQRYMAPELLDKTLDLQDWGMALRRADIYSLALLLWEILSRCPDLRPDSSPPPFQLAYEAELGNTPTSDELWALAVQERRRPYIPSTWRCFATDPDGLRELLEDCWDADPEARLTAECVQQRLAALAHPQESHPFPESCPRGCPPLCPEDCTSIPAPTILPCRPQRSACHFSVQQGPCSRNPQPACTLSPV

SEQ ID NO: 162 - protein, 402 aa, Homo sapiens [sequence omitted]

SEQ ID NO: 163 - protein, 326 aa, Homo sapiens
MALSGSTPAPCWEEDECLDYYGMLSLHRMFEVVGGQLTECELELLAFLLDEAPGAAGGLARARSGLELLLELERRGQCDESNLRLLGQLLRVLARHDLLPHLARKRRRPVSPERYSYGTSSSSKRTEGSCRRRRQSSSSANSQQGQWETGSPPTKRQRRSRGRPSGGARRRRRGAPAAPQQQSEPARPSSEGKVTCDIRLRVRAEYCEHGPALEQGVASRRPQALARQLDVFGQATAVLRSRDLGSVVCDIKFSELSYLDAFWGDYLSGALLQALRGVFLTEALREAVGREAVRLLVSVDEADYEAGRRRLLLMEEEGGRRPTEAS

SEQ ID NO: 164 - protein, 556 aa, Homo sapiens
MELCGLGLPRPPMLLALLLATLLAAMLALLTQVALVVQVAEAARAPSVSAKPGPALWPLPLSVKMTPNLLHLAPENFYISHSPNSTAGPSCTLLEEAFRRYHGYIFGFYKWHHEPAEFQAKTQVQQLLVSITLQSECDAFPNISSDESYTLLVKEPVAVLKANRVWGALRGLETFSQLVYQDSYGTFTINESTIIDSPRFSHRGILIDTSRHYLPVKIILKTLDAMAFNKFNVLHWHIVDDQSFPYQSITFPELSNKGSYSLSHVYTPNDVRMVIEYARLRGIRVLPEFDTPGHTLSWGKGQKDLLTPCYSRQNKLDSFGPINPTLNTTYSFLTTFFKEISEVFPDQFIHLGGDEVEFKCWESNPKIQDFMRQKGFGTDFKKLESFYIQKVLDIIATINKGSIVWQEVFDDKAKLAPGTIVEVWKDSAYPEELSRVTASGFPVILSAPWYLDLISYGQDWRKYYKVEPLDFGGTQKQKQLFIGGEACLWGEYVDATNLTPRLWPRASAVGERLWSSKDVRDMDDAYDRLTRHRCRMVERGIAAQPLYAGYCNHENM

SEQ ID NO: 165 - protein, 463 aa, Homo sapiens
METEQPEETFPNTETNGEFGKRPAEDMEEEQAFKRSRNTDEMVELRILLQSKNAGAVIGKGGKNIKALRTDYNASVSVPDSSGPERILSISADIETIGEILKKIIPTLEEGLQLPSPTATSQLPLESDAVECLNYQHYKGSDFDCELRLLIHQSLAGGIIGVKGAKIKELRENTQTTIKLFQECCPHSTDRVVLIGGKPDRVVECIKIILDLISESPIKGRAQPYDPNFYDETYDYGGFTMMFDDRRGRPVGFPMRGRGGFDRMPPGRGGRPMPPSRRDYDDMSPRRGPPPPPPGRGGRGGSRARNLPLPPPPPPRGGDLMAYDRRGRPGDRYDGMVGFSADETWDSAIDTWSPSEWQMAYEPQGGSGYDYSYAGGRGSYGDLGGPIITTQVTIPKDLAGSIIGKGGQRIKQIRHESGASIKIDEPLEGSEDRIITITGTQDQIQNAQYLLQNSVKQYSGKFF

SEQ ID NO: 166 - protein, 538 aa, Homo sapiens
MTTPGKENFRLKSYKNKSLNPDEMRRRREEEGLQLRKQKREEQLFKRRNVATAEEETEEEVMSDGGFHEAQINNMEMAPGGVITSDMIEMIFSKSPEQQLSATQKFRKLLSKEPNPPIDEVISTPGVVARFVEFLKRKENCTLQFESAWVLTNIASGNSLQTRIVIQAGAVPIFIELLSSEFEDVQEQAVWALGNIAGDSTMCRDYVLDCNILPPLLQLFSKQNRLTMTRNAVWALSNLCRGKSPPPEFAKVSPCLNVLSWLLFVSDTDVLADACWALSYLSDGPNDKIQAVIDAGVCRRLVELLMHNDYKVVSPALRAVGNIVTGDDIQTQVILNCSALQSLLHLLSSPKESIKKEACWTISNITAGNRAQIQTVIDANIFPALISILQTAEFRTRKEAAWAITNATSGGSAEQIKYLVELGCIKPLCDLLTVMDSKIVQVALNGLENILRLGEQEAKRNGTGINPYCALIEEAYGLDKIEFLQSHENQEIYQKAFDLIEHYFGTEDEDSSIAPQVDLNQQQYIFQQCEAPMEGFQL

SEQ ID NO: 167 - protein, 261 aa, Homo sapiens
MNPNCARCGKIVYPTEKVNCLDKFWHKACFHCETCKMTLNMKNYKGYEKKPYCNAHYPKQSFTMVADTPENLRLKQQSELQSQVRYKEEFEKNKGKGFSVVADTPELQRIKKTQDQISNIKYHEEFEKSRMGPSGGEGMEPERRDSQDGSSYRRPLEQQQPHHIPTSAPVYQQPQQQPVAQSYGGYKEPAAPVSIQRSAPGGGGKRYRAVYDYSAADEDEVSFQDGDTIVNVQQIDDGWMYGTVERTGDTGMLPANYVEAI

SEQ ID NO: 168 - protein, 372 aa, Homo sapiens
MSLRCGDAARTLGPRVFGRYFCSPVRPLSSLPDKKKELLQNGPDLQDFVSGDLADRSTWDEYKGNLKRQKGERLRLPPWLKTEIPMGKNYNKLKNTLRNLNLHTVCEEARCPNIGECWGGGEYATATATIMLMGDTCTRGCRFCSVKTARNPPPLDASEPYNTAKAIAEWGLDYVVLTSVDRDDMPDGGAEHIAKTVSYLKERNPKILVECLTPDFRGDLKAIEKVALSGLDVYAHNVETVPELQSKVRDPRVNFDQSLRVLKHAKKVQPDVISKTSIMLGLGENDEQVYATMKALREADVDCLTLGQYMQPTRRHLKVEEYITPEKFKYWEKVGNELGFHYTASGPLVRSSYKAGEFFLKNLVAKRKTKDL

SEQ ID NO: 169 - protein, 643 aa, Homo sapiens
MLLPCHWVLDATFSDGSLGQWVKNTCATYALSPVVLPPQPQPRKKATDKDYSAFHLGHLREVRLFLRGGTSDQRMDSLVLCPTYFKLWRTLSGSPGLQLSDLHFGSQPEGKFSLRRAVSVKQREEPQDWPLNEKRTLWKDSDLPTWRRGTGYTLSLPAVSPGKRLWGEKAGSLPESEPLFTYTLDEKVDKLVQFLLLKYQAKEPLTRAEMQMNVINTYTGYFPMIFRKAREFIEILFGISLTEVDPDHFYVFVNTLDLTCEGSLSDEQGMPQNRLLILILSVIFIKGNCASEEVIWEVLNAIGPWSALAGFADVLSRLALWESEGPEAFCEESGLRSAEGSVLDLANPQGLAGHRQEDGRRGLTEASPQQKKGGEDEDMPAAGMPPLPQSPPEIPPQGPPKISPQGPPQSPPQSPLDSCSSPLLWTRLDEESSSEEEDTATWHALPESESLPRYALDEKVAELVQFLLLKYQTKEPVTKAEMLTTVIKKYKDYFPMIFGKAHEFIELIFGIALTDMDPDNHSYFFEDTLDLTYEGSLIDDQGMPKNCLLILILSMIFIKGSCVPEEVIWEVLSAIGPIQRPAREVLEFLSKLSSIIPSAFPSWYMDALKDMEDRAQAIIDTTDDATAMASASPSVMSTNFCPE

SEQ ID NO: 170 - protein, 902 aa, Homo sapiens [sequence omitted]

SEQ ID NO: 171 - protein, 478 aa, Homo sapiens
MSPPLLKLGAVLSTMAMISNWMSQTLPSLVGLNTTRLSTPDTLTQISPKEGWQVYSSAQDPDGRCICTVVAPEQNLCSRDAKSRQLRQLLEKVQNMSQSIEVLNLRTQRDFQYVLKMETQMKGLKAKFRQIEDDRKTLMTKHFQELKEKMDELLPLIPVLEQYKTDAKLITQFKEEIRNLSAVLTGIQEEIGAYDYEELHQRVLSLETRLRDCMKKLTCGKLMKITGPVTVKTSGTRFGAWMTDPLASEKNNRVWYMDSYTNNKIVREYKSIADFVSGAESRTYNLPFKWAGTNHVVYNGSLYFNKYQSNIIIKYSFDMGRVLAQRSLEYAGFHNVYPYTWGGFSDIDLMADEIGLWAVYATNQNAGNIVISQLNQDTLEVMKSWSTGYPKRSAGESFMICGTLYVTNSHLTGAKVYYSYSTKTSTYEYTDIPFHNQYFHISMLDYNARDRALYAWNNGHQVLFNVTLFHIIKTEDDT

SEQ ID NO: 172 - protein, 316 aa, Homo sapiens
MAEVKVKVQPPDADPVEIENRIIELCHQFPHGITDQVIQNEMPHIEAQQRAVAINRLLSMGQLDLLRSNTGLLYRIKDSQNAGKMKGSDNQEKLVYQIIEDAGNKGIWSRDIRYKSNLPLTEINKILKNLESKKLIKAVKSVAASKKKVYMLYNLQPDRSVTGGAWYSDQDFESEFVEVLNQQCFKFLQSKAETARESKQNPMIQRNSSFASSHEVWKYICELGISKVELSMEDIETILNTLIYDGKVEMTIIAAKEGTVGSVDGHMKLYRAVNPIIPPTGLVRAPCGLCPVFDDCHEGGEISPSNCIYMTEWLEF

SEQ ID NO: 173 - protein, 524 aa, Homo sapiens
MAAPEPARAAPPPPPPPPPPPGADRVVKAVPFPPTHRLTSEEVFDLDGIPRVDVLKNHLVKEGRVDEEIALRIINEGAAILRREKTMIEVEAPITVCGDIHGQFFDLMKLFEVGGSPANTRYLFLGDYVDRGYFSIECVLYLWVLKILYPSTLFLLRGNHECRHLTEYFTFKQECKIKYSERVYEACMEAFDSLPLAALLNQQFLCVHGGLSPEIHTLDDIRRLDRFKEPPAFGPMCDLLWSDPSEDFGNEKSQEHFSHNTVRGCSYFYNYPAVCEFLQNNNLLSIIRAHEAQDAGYRMYRKSQTTGFPSLITIFSAPNYLDVYNNKAAVLKYENNVMNIRQFNCSPHPYWLPNFMDVFTWSLPFVGEKVTEMLVNVLSICSDDELMTEGEDQFDGSAAARKEIIRNKIRAIGKMARVFSVLREESESVLTLKGLTPTGMLPSGVLAGGRQTLQSATVEAIEAEKAIRGFSPPHRICSFEEAKGLDRINERMPPRKDAVQQDGFNSLNTAHATENHGTGNHTAQ

SEQ ID NO: 174 - protein, 639 aa, Homo sapiens
MATGANATPLDFPSKKRKRSRWNQDTMEQKTVIPGMPTVIPPGLTREQERAYIVQLQIEDLTRKLRTGDLGIPPNPEDRSPSPEPIYNSEGKRLNTREFRTRKKLEEERHNLITEMVALNPDFKPPADYKPPATRVSDKVMIPQDEYPEINFVGLLIGPRGNTLKNIEKECNAKIMIRGKGSVKEGKVGRKDGQMLPGEDEPLHALVTANTMENVKKAVEQIRNILKQGIETPEDQNDLRKMQLRELARLNGTLREDDNRILRPWQSSETRSITNTTVCTKCGGAGHIASDCKFQRPGDPQSAQDKARMDKEYLSLMAELGEAPVPASVGSTSGPATTPLASAPRPAAPANNPPPPSLMSTTQSRPPWMNSGPSESRPYHGMHGGGPGGPGGGPHSFPHPLPSLTGGHGGHPMQHNPNGPPPPWMQPPPPPMNQGPHPPGHHGPPPMDQYLGSTPVGSGVYRLHQGKGMMPPPPMGMMPPPPPPPSGQPPPPPSGPLPPWQQQQQQPPPPPPPSSSMASSTPLPWQQNTTTTTTSAGTGSIPPWQQQQAAAAASPGAPQMQGNPTMVPLPPGVQPPLPPGAPPPPPPPPPGSAGMMYAPPPPPPPPMDPSNFVTMMGMGVAGMPPFGMPPAPPPPPPQN

SEQ ID NO: 175 - protein, 661 aa, Homo sapiens
MDLQQSTTITSLEKWCLDESLSGCRRHYSVKKKLKLIRVLGLFMGLVAISTVSFSISAFSETDTQSTGEASVVSGPRVAQGYHQRTLLDLNDKILDYTPQPPLSKEGESENSTDHAQGDYPKDIFSLEERRKGAIILHVIGMIYMFIALAIVCDEFFVPSLTVITEKLGISDDVAGATFMAAGGSAPELFTSLIGVFIAHSNVGIGTIVGSAVFNILFVIGMCALFSREILNLTWWPLFRDVSFYIVDLIMLIIFFLDNVIMWWESLLLLTAYFCYVVFMKFNVQVEKWVKQMINRNKVVKVTAPEAQAKPSAARDKDEPTLPAKPRLQRGGSSASLHNSLMRNSIFQLMIHTLDPLAEELGSYGKLKYYDTMTEEGRFREKASILHKIAKKKCHVDENERQNGAANHVEKIELPNSTSTDVEMTPSSDASEPVQNGNLSHNIEGAEAQTADEEEDQPLSLAWPSETRKQVTFLIVFPIVFPLWITLPDVRKPSSRKFFPITFFGSITWIAVFSYLMVWWAHQVGETIGISEEIMGLTILAAGTSIPDLITSVIVARKGLGDMAVSSSVGSNIFDITVGLPLPWLLYTVIHRFQPVAVSSNGLFCAIVLLFIMLLFVILSIALCKWRMNKILGFIMFGLYFVFLVVSVLLEDRILTCPVSI

SEQ ID NO: 176 - protein, 780 aa, Homo sapiens
MAAPGGRSEPPQLPEYSCSYMVSRPVYSELAFQQQHERRLQERKTLRESLAKCCSCSRKRAFGVLKTLVPILEWLPKYRVKEWLLSDVISGVSTGLVATLQGMAYALLAAVPVGYGLYSAFFPILTYFIFGTSRHISVGPFPVVSLMVGSVVLSMAPDEHFLVSSSNGTVLNTTMIDTAARDTARVLIASALTLLVGIIQLIFGGLQIGFIVRYLADPLVGGFTTAAAFQVLVSQLKIVLNVSTKNYNGVLSIIYTLVEIFQNIGDTNLADFTAGLLTIVVCMAVKELNDRFRHKIPVPIPIEVIVTIIATAISYGANLEKNYNAGIVKSIPRGFLPPELPPVSLFSEMLAASFSIAVVAYAIAVSVGKVYATKYDYTIDGNQEFIAFGISNIFSGFFSCFVATTALSRTAVQESTGGKTQVAGIISAAIVMIAILALGKLLEPLQKSVLAAVVIANLKGMFMQLCDIPRLWRQNKIDAVIWVFTCIVSIILGLDLGLLAGLIFGLLTVVLRVQFPSWNGLGSIPSTDIYKSTKNYKNIEEPQGVKILRFSSPIFYGNVDGFKKCIKSTVGFDAIRVYNKRLKALRKIQKLIKSGQLRATKNGIISDAVSTNNAFEPDEDIEDLEELDIPTKEIEIQVDWNSELPVKVNVPKVPIHSLVLDCGAISFLDVVGVRSLRVIVKEFQRIDVNVYFASLQDYVIEKLEQCGFFDDNIRKDTFFLTVHDAILYLQNQVKSQEGQGSILETITLIQDCKDTLELIETELTEEELDVQDEAMRTLAS

SEQ ID NO: 177 - protein, 670 aa, Homo sapiens
MGETEKRIETHRIRCLSKLKMFLLAITCAFVSKTLSGSYMNSMLTQIERQFNIPTSLVGFINGSFEIGNLLLIIFVSYFGTKLHRPIMIGIGCVVMGLGCFLKSLPHFLMNQYEYESTVSVSGNLSSNSFLCMENGTQILRPTQDPSECTKEVKSLMWVYVLVGNIVRGMGETPILPLGISYIEDFAKFENSPLYIGLVETGAIIGPLIGLLLASFCANVYVDTGFVNTDDLIITPTDTRWVGAWWFGFLICAGVNVLTAIPFFFLPNTLPKEGLETNADIIKNENEDKQKEEVKKEKYGITKDFLPFMKSLSCNPIYMLFILVSVIQFNAFVNMISFMPKYLEQQYGISSSDAIFLMGIYNLPPICIGYIIGGLIMKKFKITVKQAAHIGCWLSLLEYLLYFLSFLMTCENSSVVGINTSYEGIPQDLYVENDIFADCNVDCNCPSKIWDPVCGNNGLSYLSACLAGCETSIGTGINMVFQNCSCIQTSGNSSAVLGLCDKGPDCSLMLQYFLILSAMSSFIYSLAAIPGYMVLLRCMKSEEKSLGVGLHTFCTRVFAGIPAPIYFGALMDSTCLHWGTLKCGESGACRIYDSTTFRYIYLGLPAALRGSSFVPALIILILLRKCHLPGENASSGTELIETKVKGKENECKDIYQKSTVLKDDELKTKL

SEQ ID NO: 178 - protein, 284 aa, Homo sapiens
MDAIKKKMQMLKLDKENAIDRAEQAEADKKQAEDRCKQLEEEQQALQKKLKGTEDEVEKYSESVKEAQEKLEQAEKKATDAEADVASLNRRIQLVEEELDRAQERLATALQKLEEAEKAADESERGMKVIENRAMKDEEKMELQEMQLKEAKHIAEDSDRKYEEVARKLVILEGELERSEERAEVAESKCGDLEEELKIVTNNLKSLEAQADKYSTKEDKYEEEIKLLEEKLKEAETRAEFAERSVAKLEKTIDDLEDEVYAQKMKYKAISEELDNALNDITSL

SEQ ID NO: 179 - protein, 329 aa, Homo sapiens
MTGNAGEWCLMESDPGVFTELIKGFGCRGAQVEEIWSLEPENFEKLKPVHGLIFLFKWQPGEEPAGSVVQDSRLDTIFFAKQVINNACATQAIVSVLLNCTHQDVHLGETLSEFKEFSQSFDAAMKGLALSNSDVIRQVHNSFARQQMFEFDTKTSAKEEDAFHFVSYVPVNGRLYELDGLREGPIDLGACNQDDWFSAVRPVIEKRIQKYSEGEIRFNLMAIVSDRKMIYEQKIAELQRQLAEEEPMDTDQGNSMLSAIQSEVAKNQMLIEEEVQKLKRYKIENIRRKHNYLPFIMELLKTLAEHQQLIPLVEKAKEKQNAKKAQETK

SEQ ID NO: 180 - protein, 541 aa, Homo sapiens
MKSYTPYFILLWSAVGIAKAAKIIIVPPIMFESHMYIFKTLASALHERGHHTVFLLSEGRDIAPSNHYSLQRYPGIFNSTTSDAFLQSKMRNIFSGRLTAIELFDILDHYTKNCDLMVGNHALIQGLKKEKFDLLLVDPNDMCGFVIAHLLGVKYAVFSTGLWYPAEVGAPAPLAYVPEFNSLLTDRMNLLQRMKNTGVYLISRLGVSFLVLPKYERIMQKYNLLPEKSMYDLVHGSSLWMLCTDVALEFPRPTLPNVVYVGGILTKPASPLPEDLQRWVNGANEHGFVLVSFGAGVKYLSEDIANKLAGALGRLPQKVIWRFSGPKPKNLGNNTKLIEWLPQNDLLGHSKIKAFLSHGGLNSIFETMYHGVPVVGIPLFGDHYDTMTRVQAKGMGILLEWKTVTEKELYEALVKVINNPSYRQRAQKLSEIHKDQPGHPVNRTIYWIDYIIRHNGAHHLRAAVHQISFCQYFLLDIAFVLLLGAALLYFLLSWVTKFIYRKIKSLWSRNKHSTVNGHYHNGILNGKYKRNGHIKHEKKVK

SEQ ID NO: 181 - protein, 457 aa, Homo sapiens
MSQGSVTFRDVAIDFSQEEWKWLQPAQRDLYRCVMLENYGHLVSLGLSISKPDVVSLLEQGKEPWLGKREVKRDLFSVSESSGEIKDFSPKNVIYDDSSQYLIMERILSQGPVYSSFKGGWKCKDHTEMLQENQGCIRKVTVSHQEALAQHMNISTVERPYGCHECGKTFGRRFSLVLHQRTHTGEKPYACKECGKTFSQISNLVKHQMIHTGKKPHECKDCNKTFSYLSFLIEHQRTHTGEKPYECTECGKAFSRASNLTRHQRIHIGKKQYICRKCGKAFSSGSELIRHQITHTGEKPYECIECGKAFRRFSHLTRHQSIHTTKTPYECNECRKALRCHSFLIKHQRIHAGEKLYECDECGKVFTWHASLIQHTKSHTGEKPYACAECDKAFSRSFSLILHQRTHTGEKPYVCKVCNKSFSWSSNLAKHQRTHTLDNPYEYENSFNYHSFLTEHQ

SEQ ID NO: 182 - protein, 653 aa, Homo sapiens
MASRLPTAWSCEPVTFEDVTLGFTPEEWGLLDLKQKSLYREVMLENYRNLVSVEHQLSKPDVVSQLEEAEDFWPVERGIPQDTIPEYPELQLDPKLDPLPAESPLMNIEVVEVLTLNQEVAGPRNAQIQALYAEDGSLSADAPSEQIQQQGKHPGDPEAARQRFRQFRYKDMTGPREALDQLRELCHQWLQPKARSKEQILELLVLEQFLGALPVKLRTWVESQHPENCQEVVALVEGVTWMSEEEVLPAGQPAEGTTCCLEVTAQQEEKQEDAAICPVTVLPEEPVTFQDVAVDFSREEWGLLGPTQRTEYRDVMLETFGHLVSVGWETTLENKELAPNSDIPEEEPAPSLKVQESSRDCALSSTLEDTLQGGVQEVQDTVLKQMESAQEKDLPQKKHFDNRESQANSGALDTNQVSLQKIDNPESQANSGALDTNQVLLHKIPPRKRLRKRDSQVKSMKHNSRVKIHQKSCERQKAKEGNGCRKTFSRSTKQITFIRIHKGSQVCRCSECGKIFRNPRYFSVHKKIHTGERPYVCQDCGKGFVQSSSLTQHQRVHSGERPFECQECGRTFNDRSAISQHLRTHTGAKPYKCQDCGKAFRQSSHLIRHQRTHTGERPYACNKCGKAFTQSSHLIGHQRTHNRTKRKKKQPTS

SEQ ID NO: 183 - protein, 715 aa, Homo sapiens
METLESELTCPICLELFEDPLLLPCAHSLCFSCAHRILVSSCSSGESIEPITAFQCPTCRYVISLNHRGLDGLKRNVTLQNIIDRFQKASVSGPNSPSESRRERTYRPTTAMSSERIACQFCEQDPPRDAVKTCITCEVSYCDRCLRATHPNKKPFTSHRLVEPVPDTHLRGITCLDHENEKVNMYCVSDDQLICALCKLVGRHRDHQVASLNDRFEKLKQTLEMNLTNLVKRNSELENQMAKLIQICQQVEVNTAMHEAKLMEECDELVEIIQQRKQMIAVKIKETKVMKLRKLAQQVANCRQCLERSTVLINQAEHILKENDQARFLQSAKNIAERVAMATASSQVLIPDINFNDAFENFALDFSREKKLLEGLDYLTAPNPPSIREELCTASHDTITVHWISDDEFSISSYELQYTIFTGQANFISKSWCSWGLWPEIRKCKEAVSCSRLAGAPRGLYNSVDSWMIVPNIKQNHYTVHGLQSGTRYIFIVKAINQAGSRNSEPTRLKTNSQPFKLDPKMTHKKLKISNDGLQMEKDESSLKKSHTPERFSGTGCYGAAGNIFIDSGCHYWEVVMGSSTWYAIGIAYKSAPKNEWIGKNASSWVFSRCNSNFVVRHNNKEMLVDVPPHLKRLGVLLDYDNNMLSFYDPANSLHLHTFDVTFILPVCPTFTIWNKSLMILSGLPAPDFIDYPERQECNCRPQESPYVSGMKTCH

SEQ ID NO: 184 - protein, 1076 aa, Homo sapiens [sequence omitted]

SEQ ID NO: 185 - protein, 1215 aa, Homo sapiens [sequence omitted]

SEQ ID NO: 186 - protein, 780 aa, Homo sapiens
MAPYSLLVTRLQKALGVRQYHVASVLCQRAKVAMSHFEPNEYIHYDLLEKNINIVRKRLNRPLTLSEKIVYGHLDDPASQEIERGKSYLRLRPDRVAMQDATAQMAMLQFISSGLSKVAVPSTIHCDHLIEAQVGGEKDLRRAKDINQEVYNFLATAGAKYGVGFWKPGSGIIHQIILENYAYPGVLLIGTDSHTPNGGGLGGICIGVGGADAVDVMAGIPWELKCPKVIGVKLTGSLSGWSSPKDVILKVAGILTVKGGTGAIVEYHGPGVDSISCTGMATICNMGAEIGATTSVFPYNHRMKKYLSKTGREDIANLADEFKDHLVPDPGCHYDQLIEINLSELKPHINGPFTPDLAHPVAEVGKVAEKEGWPLDIRVGLIGSCTNSSYEDMGRSAAVAKQALAHGLKCKSQFTITPGSEQIRATIERDGYAQILRDLGGIVLANACGPCIGQWDRKDIKKGEKNTIVTSYNRNFTGRNDANPETHAFVTSPEIVTALAIAGTLKFNPETDYLTGTDGKKFRLEAPDADELPKGEFDPGQDTYQHPPKDSSGQHVDVSPTSQRLQLLEPFDKWDGKDLEDLQILIKVKGKCTTDHISAAGPWLKFRGHLDNISNNLLIGAINIENGKANSVRNAVTQEFGPVPDTARYYKKHGIRWVVIGDENYGEGSSREHAALEPRHLGGRAIITKSFARIHETNLKKQGLLPLTFADPADYNKIHPVDKLTIQGLKDFTPGKPLKCIIKHPNGTQETILLNHTFNETQIEWFRAGSALNRMKELQQ

SEQ ID NO: 187 - protein, 650 aa, Homo sapiens
MGPASPAARGLSRRPGQPPLPLLLPLLLLLLRAQPAIGSLAGGSPGAAEAPGSAQVAGLCGRLTLHRDLRTGRWEPDPQRSRRCLRDPQRVLEYCRQMYPELQIARVEQATQAIPMERWCGGSRSGSCAHPHHQVVPFRCLPGEFVSEALLVPEGCRFLHQERMDQCESSTRRHQEAQEACSSQGLILHGSGMLLPCGSDRFRGVEYVCCPPPGTPDPSGTAVGDPSTRSWPPGSRVEGAEDEEEEESFPQPVDDYFVEPPQAEEEEETVPPPSSHTLAVVGKVTPTPRPTDGVDIYFGMPGEISEHEGFLRAKMDLEERRMRQINEVMREWAMADNQSKNLPKADRQALNEHFQSILQTLEEQVSGERQRLVETHATRVIALINDQRRAALEGFLAALQADPPQAERVLLALRRYLRAEQKEQRHTLRHYQHVAAVDPEKAQQMRFQVHTHLQVIEERVNQSLGLLDQNPHLAQELRPQIQELLHSEHLGPSELEAPAPGGSSEDKGGLQPPDSKDDTPMTLPKGSTEQDAASPEKEKMNPLEQYERKVNASVPRGFPFHSSEIQRDELAPAGTGVSREAVSGLLIMGAGGGSLIVLSMLLLRRKKPYGAISHGVVEVDPMLTLEEQQLRELQRHGYENPTYRFLEERP

SEQ ID NO: 188 - protein, 651 aa, Homo sapiens
MNKLRQSFRRKKDVYVPEASRPHQWQTDEEGVRTGKCSFPVKYLGHVEVDESRGMHICEDAVKRLKAERKFFKGFFGKTGKKAVKAVLWVSADGLRVVDEKTKDLIVDQTIEKVSFCAPDRNFDRAFSYICRDGTTRRWICHCFMAVKDTGERLSHAVGCAFAACLERKQKREKECGVTATFDASRTTFTREGSFRVTTATEQAEREEIMKQMQDAKKAETDKIVVGSSVAPGNTAPSPSSPTSPTSDATTSLEMNNPHAIPRRHAPIEQLARQGSFRGFPALSQKMSPFKRQLSLRINELPSTMQRKTDFPIKNAVPEVEGEAESISSLCSQITNAFSTPEDPFSSAPMTKPVTVVAPQSPTFQANGTDSAFHVLAKPAHTALAPVAMPVRETNPWAHAPDAANKEIAATCSGTEWGQSSGAASPGLFQAGHRRTPSEADRWLEEVSKSVRAQQPQASAAPLQPVLQPPPPTAISQPASPFQGNAFLTSQPVPVGVVPALQPAFVPAQSYPVANGMPYPAPNVPVVGITPSQMVANVFGTAGHPQAAHPHQSPSLVRQQTFPHYEASSATTSPFFKPPAQHLNGSAAFNGVDDGRLASADRHTEVPTGTCPVDPFEAQWAALENKSKQRTNPSPTNPFSSDLQKTFEIEL

SEQ ID NO: 189 - protein, 803 aa, Homo sapiens
MNSAEQTVTWLITLGVLESPKKTISDPEGFLQASLKDGVVLCRLLERLLPGTIEKVYPEPRSESECLSNIREFLRGCGASLRLELLFPPSQPPQHLVTTILLSASTFDANDLYQGQNFNKVLSSLVTLNKVTADIGLGSDSVCARPSSHRIKSFDSLGSQSLHTRTSKLFQGQYRSLDMTDNSNNQLVVRAKFNFQQTNEDELSFSKGDVIHVTRVEEGGWWEGTLNGRTGWFPSNYVREVKASEKPVSPKSGTLKSPPKGFDTTAINKSYYNVVLQNILETENEYSKELQTVLSTYLRPLQTSEKLSSANISYLMGNLEEICSFQQMLVQSLEECTKLPEAQQRVGGCFLNLMPQMKTLYLTYCANHPSAVNVLTEHSEELGEFMETKGASSPGILVLTTGLSKPFMRLDKYPTLLKELERHMEDYHTDRQDIQKSMAAFKNLSAQCQEVRKRKELELQILTEAIRNWEGDDIKTLGNVTYMSQVLIQCAGSEEKNERYLLLFPNVLLMLSASPRMSGFIYQGKLPTTGMTITKLEDSENHRNAFEISGSMIERILVSCNNQQDLQEWVEHLQKQTKVTSVGNPTIKPHSVPSHTLPSHPVTPSSKHADSKPAPLTPAYHTLPHPSHHGTPHTTINWGPLEPPKTPKPWSLSCLRPAPPLRPSAALCYKEDLSKSPKTMKKLLPKRKPERKPSDEEFASRKSTAALEEDAQILKVIEAYCTSAKTRQTLNSTWQGTDLMHNHVLADDDQPSLDSLGRRSSLSRLEPSDLSEDSDYDSIWTAHSYRMGSTSRKSCCSYISHQN

SEQ ID NO: 190 - protein, 353 aa, Homo sapiens
MACCLSEEAKEARRINDEIERQLRRDKRDARRELKLLLLGTGESGKSTFIKQMRIIHGSGYSDEDKRGFTKLVYQNIFTAMQAMIRAMDTLKIPYKYEHNKAHAQLVREVDVEKVSAFENPYVDAIKSLWNDPGIQECYDRRREYQLSDSTKYYLNDLDRVADPAYLPTQQDVLRVRVPTTGIIEYPFDLQSVIFRMVDVGGQRSERRKWIHCFENVTSIMFLVALSEYDQVLVESDNENRMEESKALFRTIITYPWFQNSSVILFLNKKDLLEEKIMYSHLVDYFPEYDGPQRDAQAAREFILKMFVDLNPDSDKIIYSHFTCATDTENIRFVFAAVKDTILQLNLKEYNLV

SEQ ID NO: 191 - protein, 394 aa, Homo sapiens
MALLDLALEGMAVFGFVLFLVLWLMHFMAIIYTRLHLNKKATDKQPYSKLPGVSLLKPLKGVDPNLINNLETFFELDYPKYEVLLCVQDHDDPAIDVCKKLLGKYPNVDARLFIGGKKVGINPKINNLMPGYEVAKYDLIWICDSGIRVIPDTLTDMVNQMTEKVGLVHGLPYVADRQGFAATLEQVYFGTSHPRYYISANVTGFKCVTGMSCLMRKDVLDQAGGLIAFAQYIAEDYFMAKAIADRGWRFAMSTQVAMQNSGSYSISQFQSRMIRWTKLRINMLPATIICEPISECFVASLIIGWAAHHVFRWDIMVFFMCHCLAWFIFDYIQLRGVQGGTLCFSKLDYAVAWFIRESMTIYIFLSALWDPTISWRTGRYRLRCGGTAEEILDV

SEQ ID NO: 192 - protein, 660 aa, Homo sapiens
MEALMARGALTGPLRALCLLGCLLSHAAAAPSPIIKFPGDVAPKTDKELAVQYLNTFYGCPKESCNLFVLKDTLKKMQKFFGLPQTGDLDQNTIETMRKPRCGNPDVANYNFFPRKPKWDKNQITYRIIGYTPDLDPETVDDAFARAFQVWSDVTPLRFSRIHDGEADIMINFGRWEHGDGYPFDGKDGLLAHAFAPGTGVGGDSHFDDDELWTLGEGQVVRVKYGNADGEYCKFPFLFNGKEYNSCTDTGRSDGFLWCSTTYNFEKDGKYGFCPHEALFTMGGNAEGQPCKFPFRFQGTSYDSCTTEGRTDGYRWCGTTEDYDRDKKYGFCPETAMSTVGGNSEGAPCVFPFTFLGNKYESCTSAGRSDGKMWCATTANYDDDRKWGFCPDQGYSLFLVAAHEFGHAMGLEHSQDPGALMAPIYTYTKNFRLSQDDIKGIQELYGASPDIDLGTGPTPTLGPVTPEICKQDIVFDGIAQIRGEIFFFKDRFIWRTVTPRDKPMGPLLVATFWPELPEKIDAVYEAPQEEKAVFFAGNEYWIYSASTLERGYPKPLTSLGLPPDVQRVDAAFNWSKNKKTYIFAGDKFWRYNEVKKKMDPGFPKLIADAWNAIPDNLDAVVDLQGGGHSYFFKGAYYLKLENQSLKSVKFGSIKSDWLGC

SEQ ID NO: 193 - protein, 260 aa, Homo sapiens
MARPHPWWLCVLGTLVGLSATPAPKSCPERHYWAQGKLCCQMCEPGTFLVKDCDQHRKAAQCDPCIPGVSFSPDHHTRPHCESCRHCNSGLLVRNCTITANAECACRNGWQCRDKECTECDPLPNPSLTARSSQALSPHPQPTHLPYVSEMLEARTAGHMQTLADFRQLPARTLSTHWPPQRSLCSSDFIRILVIFSGMFLVFTLAGALFLHQRRKYRSNKGESPVEPAEPCRYSCPREEEGSTIPIQEDYRKPEPACSP

SEQ ID NO: 194 - protein, 885 aa, Homo sapiens
MGCAPSIHVSQSGVIYCRDSDESSSPRQTTSVSQGPAAPLPGLFVQTDAADAIPPSRASGPPSVARVRRARTELGSGSSAGSAAPAATTSRGRRRHCCSSAEAETQTCYTSVKQVSSAEVRIGPMRLTQDPIQVLLIFAKEDSQSDGFWWACDRAGYRCNIARTPESALECFLDKHHEIIVIDHRQTQNFDAEAVCRSIRATNPSEHTVILAVVSRVSDDHEEASVLPLLHAGFNRRFMENSSIIACYNELIQIEHGEVRSQFKLRACNSVFTALDHCHEAIEITSDDHVIQYVNPAFERMMGYHKGELLGKELADLPKSDKNRADLLDTINTCIKKGKEWQGVYYARRKSGDSIQQHVKITPVIGQGGKIRHFVSLKKLCCTTDNNKQIHKIHRDSGDNSQTEPHSFRYKNRRKESIDVKSISSRGSDAPSLQNRRYPSMARIHSMTIEAPITKVINIINAAQENSPVTVAEALDRVLEILRTTELYSPQLGTKDEDPHTSDLVGGLMTDGLRRLSGNEYVFTKNVHQSHSHLAMPITINDVPPCISQLLDNEESWDFNIFELEAITHKRPLVYLGLKVFSRFGVCEFLNCSETTLRAWFQVIEANYHSSNAYHNSTHAADVLHATAFFLGKERVKGSLDQLDEVAALIAATVHDVDHPGRTNSFLCNAGSELAVLYNDTAVLESHHTALAFQLTVKDTKCNIFKNIDRNHYRTLRQAIIDMVLATEMTKHFEHVNKFVNSINKPMAAEIEGSDCECNPAGKNFPENQILIKRMMIKCADVANPCRPLDLCIEWAGRISEEYFAQTDEEKRQGLPVVMPVFDRNTCSIPKSQISFIDYFITDMFDAWDAFAHLPALMQHLADNYKHWKTLDDLKCKSLRLPSDS

SEQ ID NO: 195 - protein, 427 aa, Homo sapiens
MFFTCGPNEAMVVSGFCRSPPVMVAGGRVFVLPCIQQIQRISLNTLTLNVKSEKVYTRHGVPISVTGIAQVKIQGQNKEMLAAACQMFLGKTEAEIAHIALETLEGHQRAIMAHMTVEEIYKDRQKFSEQVFKVASSDLVNMGISVVSYTLKDIHDDQDYLHSLGKARTAQVQKDARIGEAEAKRDAGIREAKAKQEKVSAQYLSEIEMAKAQRDYELKKAAYDIEVNTRRAQADLAYQLQVAKTKQQIEEQRVQVQVVERAQQVAVQEQEIARREKELEARVRKPAEAERYKLERLAEAEKSQLIMQAEAEAASVRMRGEAEAFAIGARARAEAEQMAKKAEAFQLYQEAAQLDMLLEKLPQVAEEISGPLTSANKITLVSSGSGTMGAAKVTGEVLDILTRLPESVERLTGVSISQVNHKPLRTA

SEQ ID NO: 196 - protein, 495 aa, Homo sapiens
MPMGSLQPLATLYLLGMLVASCLGRLSWYDPDFQARLTRSNSKCQGQLEVYLKDGWHMVCSQSWGRSSKQWEDPSQASKVCQRLNCGVPLSLGPFLVTYTPQSSIICYGQLGSFSNCSHSRNDMCHSLGLTCLEPQKTTPPTTRPPPTTTPEPTAPPRLQLVAQSGGQHCAGVVEFYSGSLGGTISYEAQDKTQDLENFLCNNLQCGSFLKHLPETEAGRAQDPGEPREHQPLPIQWKIQNSSCTSLEHCFRKIKPQKSGRVLALLCSGFQPKVQSRLVGGSSICEGTVEVRQGAQWAALCDSSSARSSLRWEEVCREQQCGSVNSYRVLDAGDPTSRGLFCPHQKLSQCHELWERNSYCKKVFVTCQDPNPAGLAAGTVASIILALVLLVVLLVVCGPLAYKKLVKKFRQKKQRQWIGPTGMNQNMSFHRNHTATVRSHAENPTASHVDNEYSQPPRNSRLSAYPALEGVLHRSSMQPDNSSDSDYDLHGAQRL

SEQ ID NO: 197 - protein, 540 aa, Homo sapiens
MGTTARAALVLTYLAVASAASEGGFTATGQRQLRPEHFQEVGYAAPPSPPLSRSLPMDHPDSSQHGPPFEGQSQVQPPPSQEATPLQQEKLLPAQLPAEKEVGPPLPQEAVPLQKELPSLQHPNEQKEGTPAPFGDQSHPEPESWNAAQHCQQDRSQGGWGHRLDGFPPGRPSPDNLNQICLPNRQHVVYGPWNLPQSSYSHLTRQGETLNFLEIGYSRCCHCRSHTNRLECAKLVWEEAMSRFCEAEFSVKTRPHWCCTRQGEARFSCFQEEAPQPHYQLRACPSHQPDISSGLELPFPPGVPTLDNIKNICHLRRFRSVPRNLPATDPLQRELLALIQLEREFQRCCRQGNNHTCTWKAWEDTLDKYCDREYAVKTHHHLCCRHPPSPTRDECFARRAPYPNYDRDILTIDIGRVTPNLMGHLCGNQRVLTKHKHIPGLIHNMTARCCDLPFPEQACCAEEEKLTFINDLCGPRRNIWRDPALCCYLSPGDEQVNCFNINYLRNVALVSGDTENAKGQGEQGSTGGTNISSTSEPKEE

1. A composition for detecting, identifying, or predicting the presence or metastasis of kidney cancer in a subject in vitro comprising one or more probes selected from the probes of the following group I and/or group II:
group I: polynucleotides consisting of:
(a) a polynucleotide consisting of a nucleotide sequence as shown in any of SEQ ID NOS: 1 to 10, 12 to 20, and 22 to 47, a mutant thereof, or a fragment comprising at least 15 continuous nucleotides thereof,
(b) a polynucleotide comprising a nucleotide sequence as shown in any of SEQ ID NOS: 1 to 10, 12 to 20, and 22 to 47,
(c) a polynucleotide consisting of a nucleotide sequence complementary to a nucleotide sequence as shown in any of SEQ ID NOS: 1 to 10, 12 to 20, and 22 to 47, a mutant thereof, or a fragment comprising at least 15 continuous nucleotides thereof,
(d) a polynucleotide comprising a nucleotide sequence complementary to a nucleotide sequence as shown in any of SEQ ID NOS: 1 to 10, 12 to 20, and 22 to 47, and
(e) a polynucleotide hybridizing under stringent conditions to any of the polynucleotides (a) to (d), or a fragment comprising at least 15 continuous nucleotides thereof; and
group II: antibodies, fragments thereof or chemically modified derivatives thereof consisting of:
(f) an antibody specifically binding to at least one of a polypeptide comprising an amino acid sequence encoded by a nucleotide sequence as shown in any of SEQ ID NOS: 1 to 10, 12 to 20, and 22 to 47 or a polypeptide having an amino acid sequence as shown in any of SEQ ID NOS: 101 to 110, 112 to 120, and 122 to 147, a mutant thereof, and a fragment thereof; a fragment of the antibody; or a chemically modified derivative of the antibody,
(g) an antibody specifically binding to at least one of a polypeptide having an amino acid sequence as shown in any of SEQ ID NOS: 151, 153, and 155 to 160, a mutant thereof, and a fragment thereof, a fragment of the antibody, or a chemically modified derivative of the antibody, and
(h) an antibody specifically binding to at least one of a polypeptide having an amino acid sequence as shown in any of SEQ ID NOS: 161 to 190, a mutant thereof, and a fragment thereof; a fragment of the antibody; or a chemically modified derivative of the antibody.

2. The composition according to claim 1, wherein each of the probes of group I and group II (f) is capable of detecting, identifying, or predicting the presence or metastasis of kidney cancer.

3. The composition according to claim 1, wherein each of the probes of group II (g) and (h) is capable of detecting, identifying, or predicting the presence of kidney cancer.

4. The composition according to claim 1, wherein the polynucleotide is DNA or RNA.

5. The composition according to claim 1, wherein the fragments of group I are each a polynucleotide comprising at least 60 continuous nucleotides.

6. The composition according to claim 1, wherein the fragments of group I are each a polynucleotide comprising a nucleotide sequence as shown in any of SEQ ID NOS: 51 to 60, 62 to 70, and 72 to 97 in the nucleotide sequence as shown in any of SEQ ID NOS: 1 to 10, 12 to 20, and 22 to 47 or a polynucleotide comprising a nucleotide sequence complementary thereto.

7. The composition according to claim 1, wherein the fragments of group I are each a polynucleotide comprising a nucleotide sequence as shown in any of SEQ ID NOS: 51 to 60, 62 to 70, and 72 to 97 or a nucleotide sequence complementary thereto.

8. The composition according to claim 1, which further comprises, as a probe, one or more polynucleotides selected from among a polynucleotide consisting of the nucleotide sequence as shown in any of SEQ ID NOS: 11, 21, and 48 to 50, a polynucleotide consisting of a complementary sequence thereof, a polynucleotide hybridizing under stringent conditions to said polynucleotide, or a fragment comprising at least 15 continuous nucleotides thereof, in addition to the probe or probes of group I.

9. The composition according to claim 8, wherein the fragment is a polynucleotide comprising at least 60 continuous nucleotides.

10. The composition according to claim 8, wherein the fragment is a polynucleotide comprising the nucleotide sequence as shown in any of SEQ ID NOS: 61, 71, and 98 to 100 in the nucleotide sequence as shown in any of SEQ ID NOS: 11, 21, and 48 to 50 or a polynucleotide comprising a nucleotide sequence complementary thereto.

11. The composition according to claim 8, wherein the fragment is a polynucleotide comprising the nucleotide sequence as shown in any of SEQ ID NOS: 61, 71, and 98 to 100 or a nucleotide sequence complementary thereto.

12. The composition according to claim 1, which further comprises an antibody that binds specifically to at least one of a polypeptide as shown in any of SEQ ID NOS: 111, 121, and 148 to 150, a mutant of the polypeptide, and a fragment of the polypeptide; a fragment of the antibody; or a chemically modified derivative of the antibody, in addition to the probe or probes of group II (f).

13. The composition according to claim 1, which further comprises an antibody that binds specifically to at least one of a polypeptide comprising an amino acid sequence as shown in any of SEQ ID NOS: 152, 154, and 191, a mutant of the polypeptide, and a fragment of the polypeptide; a fragment of the antibody; or a chemically modified derivative of the antibody, in addition to the probe or probes of group II (g).

14. The composition according to claim 1, which further comprises an antibody that binds specifically to at least one of a polypeptide comprising an amino acid sequence as shown in any of SEQ ID NOS: 192 to 197, a mutant of the polypeptide, and a fragment of the polypeptide; a fragment of the antibody; or a chemically modified derivative of the antibody, in addition to the probe or probes of group II (h).

15. The composition according to claim 1, wherein the fragment of the polypeptide or a mutant thereof comprises an epitope having at least 7 amino acids.

16. The composition according to claim 1 above, wherein each of the antibodies is a polyclonal antibody, a monoclonal antibody, a synthetic antibody, a recombinant antibody, a polyspecific antibody, or a single-chain antibody.

17. The composition according to claim 1, which comprises at least two probes selected from the probes of group I or group II (0, (g), or (h) in combination.

18. A kit for detecting, identifying, or predicting the presence or metastasis of kidney cancer in a subject in vitro, comprising one or more probes selected from the probes of group I or group II (0, (g), or (h) as defined in claim 1.

19. The kit according to claim 18, which further comprises, as a probe, a polynucleotide consisting of the nucleotide sequence as shown in any of SEQ ID NOS: 11, 21, and 48 to 50, a polynucleotide consisting of a complementary sequence thereof, a polynucleotide hybridizing under stringent conditions to said polynucleotide, or a fragment comprising at least 15 continuous nucleotides thereof.

20. The kit according to claim 18, wherein the probe is a polynucleotide consisting of the nucleotide sequence as shown in any of SEQ ID NOS: 1 to 10, 11, 12 to 20, 21, 22 to 47, and 48 to 50, a polynucleotide consisting of a complementary sequence thereof, a polynucleotide hybridizing under stringent conditions to said polynucleotide, or a fragment comprising at least 15 continuous nucleotides thereof.

21. The kit according to claim 18, wherein the fragment of group I is a polynucleotide comprising at least 60 continuous nucleotides.

22. The kit according to claim 18, wherein the fragment of group I is a polynucleotide comprising the nucleotide sequence as shown in any of SEQ ID NOS: 51 to 60, 61, 62 to 70, 71, 72 to 97, and 98 to 100 and comprising at least 60 continuous nucleotides in the nucleotide sequence as shown in any of SEQ ID NOS: 1 to 10, 11, 12 to 20, 21, 22 to 47, and 48 to 50 or a polynucleotide comprising a nucleotide sequence complementary thereto.

23. The kit according to claim 18, wherein the fragment of group I is a polynucleotide comprising a nucleotide sequence as shown in any of SEQ ID NOS: 51 to 60, 61, 62 to 70, 71, 72 to 97, and 98 to 100 or a nucleotide sequence complementary thereto.

24. The kit according to claim 18, wherein the fragment of group I is a polynucleotide comprising a nucleotide sequence as shown in any of SEQ ID NOS: 51 to 60, 61, 62 to 70, 71, 72 to 97, and 98 to 100.

25. The kit according to claim 18, which comprises at least two or all polynucleotides each comprising a nucleotide sequence as shown in any of SEQ ID NOS: 51 to 60, 61, 62 to 70, 71, 72 to 97, and 98 to 100 or a complementary sequence of any thereof.

26. The kit according to claim 18, which further comprises an antibody that binds specifically to at least one of a polypeptide as shown in any of SEQ ID NOS: 111, 121, and 148 to 150, a mutant of the polypeptide, and a fragment of the polypeptide; a fragment of the antibody; or a chemically modified derivative of the antibody, in addition to a probe or probes of group II (f).

27. The kit according to claim 18, which further comprises an antibody that binds specifically to at least one of a polypeptide as shown in any of SEQ ID NOS: 152, 154, and 191, a mutant of the polypeptide, and a fragment of the polypeptide; a fragment of the antibody; or a chemically modified derivative of the antibody, in addition to a probe or probes of group II (g).

28. The kit according to claim 18, which further comprises an antibody that binds specifically to at least one of a polypeptide as shown in any of SEQ ID NOS: 192 to 197, a mutant of the polypeptide, and a fragment of the polypeptide; a fragment of the antibody; or a chemically modified derivative of the antibody, in addition to a probe or probes of group II (h).

29. The kit according to claim 18, wherein the probes are packaged in different containers, alone or in combination.

30. A DNA chip for detecting, identifying, or predicting the presence or metastasis of kidney cancer in a subject in vitro, comprising one or more probes selected from the probes of group I (a) to (e) as defined in claim 1.

31. The DNA chip according to claim 30, which further comprises a polynucleotide consisting of the nucleotide sequence as shown in any of SEQ ID NOS: 11, 21, and 48 to 50, a mutant thereof, and/or a fragment thereof.

32. The DNA chip according to claim 30, which comprises at least two or all of the polynucleotides comprising a nucleotide sequence as shown in any of SEQ ID NOS: 51 to 60, 61, 62 to 70, 71, 72 to 97, and 98 to 100 or complementary sequences thereto.

33. A method for detecting, identifying, or predicting the presence or metastasis of kidney cancer in vitro, comprising using a probe or probes selected from the probes of group I and/or group II (f), (g), and (h) as defined in claim 1, to measure in vitro the presence, existing amount, or expression level of one or more kidney cancer-associated target nucleic acids in a biological sample from a subject.

34. The method according to claim 33, wherein the measurement is carried out using a DNA chip.

35. The method according to claim 33, wherein the presence or metastasis of kidney cancer is detected, identified, or predicted using changes compared with a control sample as an indication.

36. The method according to claim 33, wherein the measurement is carried out by an immunological method.

37. The method according to claim 36, wherein the measurement by the immunological method is carried out using an antibody of group II (f), (g), or (h), a fragment thereof, or a chemically modified derivative thereof.

38. The method according to claim 37, wherein the antibody, fragment, or chemically modified derivative is labeled.

39. The method according to claim 33, wherein the biological sample is a kidney tissue or a kidney cell, blood, plasma, serum, or urine.

40. A method for detecting, identifying, or predicting the presence or metastasis of kidney cancer in vitro, comprising measuring in vitro the presence, existing amount, or expression level of one or more kidney cancer-associated target nucleic acids in a biological sample from a subject using the composition according to claim 1, the kit according to claim 18, or the DNA chip according to claim 30.

41. A method for predicting in vitro a patient's prognosis and/or metastasis of kidney cancer by comparing the expression level of a target nucleic acid in a biological sample of kidney cancer cells obtained from a subject with that of the target nucleic acid in kidney cancer cells obtained from a patient population with poor prognosis and/or that of the target nucleic acid in kidney cancer cells obtained from a patient population with good prognosis using a probe or probes selected from group I as defined in claim 1, or the composition of claim 1, the kit of claim 18, or the DNA chip of claim 30 comprising the probe or probes, wherein the target nucleic acid can be detected by the polynucleotide contained in the composition, kit, or DNA chip or a mutant or fragment of such polynucleotide, and, when the expression level of the target nucleic acid in the subject is different from that in the patient population with good prognosis and/or that in the patient population with poor prognosis, the subject is identified to have a poor or good prognosis and/or the metastasis of kidney cancer is determined to have or have not occurred.

42. The method according to claim 41, which involves the use of a DNA chip.

43. The method according to claim 41, which comprises the steps of:
(1) measuring in vitro expression levels of target nucleic acids in a plurality of biological samples that are known to be kidney cancer cells obtained from a patient with a poor prognosis and/or kidney cancer cells obtained from a patient with a good prognosis using a probe or probes selected from group I as defined in claim 1, the composition of claim 1, the kit of claim 18, or the DNA chip of claim 30 comprising the probe or probes;
(2) preparing a discriminant, a support vector machine, using, as training samples, the expression levels of the target nucleic acids as determined in step (1);
(3) measuring in vitro expression levels of the target nucleic acids in a biological sample obtained from the kidney cancer of the subject in the same manner as in step (1); and
(4) assigning the expression levels of the target nucleic acids identified in step (3) to the discriminant prepared in step (2) and, based on the results obtained with the use of the discriminant, predicting the prognosis for a subject and/or determining whether or not kidney cancer of the subject is metastatic or nonmetastatic, provided that the target nucleic acids can be detected by the polynucleotides, mutants thereof, or fragments thereof, contained in the composition, kit, or DNA chip.

44. Use of a probe or probes selected from the probes of group I and/or group II as defined in claim 1, or of the composition of claim 1, the kit of claim 18, or the DNA chip of claim 30 comprising the probe or probes, in detecting, identifying, or predicting in vitro the presence or metastasis of kidney cancer in a biological sample from a subject.
